(19) United States
(12) Patent Application Publication
(10) Pub. No.: US 2022/0184120 A1
(43) Pub. Date: Jun. 16, 2022

(54) ANTI-VARIABLE MUC1* ANTIBODIES AND USES THEREOF

(71) Applicant: MINERVA BIOTECHNOLOGIES CORPORATION, Waltham, MA (US)

(72) Inventors: Cynthia Bamdad, Waltham, MA (US); Benoit Smagghe, Waltham, MA (US)

(21) Appl. No.: 17/373,609

(22) Filed: Jul. 12, 2021

Related U.S. Application Data
(63) Continuation of application No. PCT/US2020/013410, filed on Jan. 13, 2020.
Application No. PCT/US2020/013410 is a continuation-in-part of application No. PCT/US19/19566, filed on Feb. 26, 2019.
Application No. PCT/US19/19566 is a continuation-in-part of application No. PCT/US19/21556, filed on Mar. 11, 2019.
(60) Provisional application No. 62/791,661, filed on Jan. 11, 2019.

(51) Int. Cl. A61K 35/17; C12N 9/50; C07K 16/28

(52) U.S. Cl. CPC A61K 35/17; C07K 2317/565; C07K 16/2863; C12N 9/50

(57) ABSTRACT

The present application discloses an antibody, or fragment thereof, for the diagnosis, treatment or prevention of cancers wherein the antibody specifically binds to the PSMGFR peptide (SEQ ID NO:2) or a fragment thereof of the peptide.

### CROSS-REFERENCE TO RELATED APPLICATIONS

[0001] The present application is a continuation of PCT Patent Application No. PCT/US2020/013410, filed Jan. 13, 2020, which claims the benefit of priority to U.S. Provisional Patent Application No. 62/791,661, filed Jan. 11, 2019, and is a continuation-in-part of PCT Patent Application Nos. PCT/US2019/019566, filed Feb. 26, 2019, and continuation-in-part of PCT/US2019/021556, filed Mar. 11, 2019, each of which is hereby incorporated by reference in their entirety.

### BACKGROUND OF THE INVENTION

### 1. Field of the Invention

[0002] The present application relates to human, humanized and non-human anti-MUC1* antibodies and methods of making and using them. The present application also relates to using an immune cell transfected or transduced with a cleavage enzyme for the treatment of cancer. The present invention also relates to using an immune cell transfected or transduced with a CAR and another protein for the treatment of cancer.

### 2. General Background and State of the Art

[0003] We previously discovered that a cleaved form of the MUC1 (SEQ ID NO:1) transmembrane protein is a growth factor receptor that drives the growth of over 75% of all human cancers. The cleaved form of MUC1, which we called MUC1* (pronounced muk 1 star), is a powerful growth factor receptor. Cleavage and release of the bulk of the extracellular domain of MUC1 unmasks a binding site for activating ligands dimeric NME1, NME6, NME7, NME7_{AB}, NME7-X1 or NME8. It is an ideal target for cancer drugs as it is aberrantly expressed on over 75% of all cancers and is likely overexpressed on an even higher percentage of metastatic cancers (Mahanta et al. (2008) A Minimal Fragment of MUC1 Mediates Growth of Cancer Cells. PLoS ONE 3(4): e2054. doi:10.1371/journal.pone.0002054; Fessler et al. (2009), “MUC1* is a determinant of trastuzumab (Herceptin) resistance in breast cancer cells,” Breast Cancer Res Treat. 118(1):113-124). After MUC1 cleavage most of its extracellular domain is shed from the cell surface. The remaining portion has a truncated extracellular domain that comprises most or all of the primary growth factor receptor sequence called PSMGFR (SEQ ID NO:2).

[0004] Antibodies are increasingly used to treat human diseases. Antibodies generated in non-human species have historically been used as therapeutics in humans, such as horse antibodies. More recently, antibodies are engineered or selected so that they contain mostly, or all, human sequences in order to avoid a generalized rejection of the foreign antibody. The process of engineering recognition fragments of a non-human antibody into a human antibody is generally called ‘humanizing’. The amount of non-human sequences that are used to replace the human antibody sequences determines whether they are called chimeric, humanized or fully human.

[0005] Alternative technologies exist that enable generation of humanized or fully human antibodies. These strategies involve screening libraries of human antibodies or antibody fragments and identifying those that bind to the target antigen, rather than immunizing an animal with the antigen. Another approach is to engineer the variable region(s) of an antibody into an antibody-like molecule. Another approach involves immunizing a humanized animal. The present invention is intended to also encompass these approaches for use with recognition fragments of antibodies that the inventors have determined bind to the extracellular domain of MUC1*.

[0006] In addition to treating patients with an antibody, cancer immunotherapies have recently been shown to be effective in the treatment of blood cancers. One cancer immunotherapy, called CAR T (chimeric antigen receptor T cell) therapy, engineers a T cell so that it expresses a chimeric receptor having an extra cellular domain that recognizes a tumor antigen, a transmembrane domain and cytoplasmic tail comprising T cell signaling and co-stimulatory components (Dai H, Wang Y, Lu X, Han W. (2016) Chimeric Antigen Receptors Modified T-Cells for Cancer Therapy. J Natl Cancer Inst. 108(7): djv439). Such receptor is composed of a single chain antibody fragment (scFv) that recognizes a tumor antigen, linked to a T cell transmembrane, signaling domain and co-stimulatory domain or domains. Upon binding of the receptor to a cancer associated antigen, a signal is transmitted resulting in T-cell activation, propagation and the targeted killing of the cancer cells. In practice, T cells are isolated from a patient or donor and transduced with a CAR, expanded and then injected back into the patient. If from a donor, the immune cells may be mutated or engineered such that they do not induce graft versus host disease in the recipient. When the CAR T cells bind to the antigen on a cancer cell, the CAR T cells attack the cancer cells and then expand that population of T cells.

[0007] Thus far, CAR T therapies have been very successful in the treatment of blood cancers but as yet have not shown efficacy against solid tumors in humans. Because most blood cancers are B cell malignancies, the CAR T cells can just eliminate all of the patient's B cells without causing serious harm to the patient. There is no B cell equivalent in solid tumors. Most tumor associated antigens are also expressed on normal tissues; they are just expressed at a higher level in cancerous tissues. Thus, the challenge is to develop an antibody that recognizes an epitope on a tumor associated antigen that is somehow different in the context of the tumor compared to normal tissue. To further minimize the risk of off-tumor/on-target killing of normal tissues, the antibody should recognize and bind to cancerous tissues at least two-times more than normal tissues. Antibodies that are not so cancer selective may be used therapeutically if they are inducibly expressed at the tumor site.

[0008] Another cancer therapy that incorporates cancer selective antibodies is Bi-specific T cell Engagers, also called BiTEs. The BiTE approach attempts to eliminate the CAR T associated risk of off-tumor/on-target effects. Unlike CAR T, BiTEs are bispecific antibodies that should not pose any greater risk than regular antibody-based therapies. However, unlike typical anti-cancer antibodies that bind to and block a cancer antigen, BiTEs are designed to bind to an antigen on the tumor cell and simultaneously bind to an antigen on an immune cell, such as a T cell. In this way, a BiTE recruits the T cell to the tumor. BiTEs are engineered proteins that simultaneously bind to a cancer associated antigen and a T-cell surface protein such as CD3-epsilon. BiTEs are antibodies made by genetically linking the scFv's of an antibody that binds to a T cell antigen, like anti-CD3-epsilon to a scFv of a therapeutic monoclonal antibody that binds to a cancer antigen (Patrick A. Baeuerle, and Carsten Reinhardt (2009) Bispecific T-cell engaging antibodies for cancer therapy. Cancer Res. 69(12):4941-4944). A drawback of BiTE technology is that, unlike CAR T cells, they do not expand in the patient, so have limited persistence.

[0009] Yet another cancer therapy that incorporates cancer selective antibodies is antibody drug conjugate, also called ADC, technology. In this case, a toxin, or a precursor to a toxin, is linked to a cancer selective antibody. Unlike CAR T cells that use the CD8 positive T cell's natural killing to kill cancer cells, ADCs carry a toxic payload to the tumor. Drawbacks of ADCs include the potential of delivering the toxic payload to normal cells and that most ADCs require binding to a cell surface molecule which then gets internalized after binding, with an approximate 10,000 surface molecule required for resultant cell death.

### SUMMARY OF THE INVENTION

[0010] In one aspect, the present invention is directed to a non-human, human or humanized anti-MUC1* antibody or antibody fragment or antibody-like protein that binds to a region on extracellular domain of MUC1 isoform or cleavage product that is devoid of the tandem repeat domains. The non-human, human or humanized anti-MUC1* antibody or antibody fragment or antibody-like protein may specifically bind to

[0011] (i) PSMGFR region of MUC1;

[0012] (ii) PSMGFR peptide;

[0013] (iii) a peptide having amino acid sequence of

(N-10)
(SEQ ID NO: 3)
QFNQYKTEAASRYNLTISDVSVSDVPFPFSAQSGA

[0014] (iv) a peptide having amino acid sequence of

(N-19)
(SEQ ID NO: 4)
ASRYNLTISDVSVSDVPFPFSAQSGA

[0015] (v) a peptide having amino acid sequence of

(N-23)
(SEQ ID NO: 5)
NLTISDVSVSDVPFPFSAQSGA

[0016] (vi) a peptide having amino acid sequence of

(N-26)
(SEQ ID NO: 6)
ISDVSVSDVPFPFSAQSGA

[0017] (vii) a peptide having amino acid sequence of

(N-30)
(SEQ ID NO: 7)
SVSDVPFPFSAQSGA

[0018] (viii) a peptide having amino acid sequence of

(N-10/C-5)
(SEQ ID NO: 8)
QFNQYKTEAASRYNLTISDVSVSDVPFPFS

[0019] (ix) a peptide having amino acid sequence of

(N-19/C-5)
(SEQ ID NO: 9)
ASRYNLTISDVSVSDVPFPFS

[0020] (x) a peptide having amino acid sequence of

(SEQ ID NO: 10)
FPFSAQSGA

[0021] The non-human, human or humanized antibody may be IgG1, IgG2, IgG3, IgG4 or IgM. The human or humanized antibody fragment or antibody-like protein may be scFv or scFv-Fc.

[0022] The murine, camelid, human or humanized antibody, antibody fragment or antibody-like protein as in above may comprise a heavy chain variable region and light chain variable region which is derived from mouse monoclonal MNC2, MNE6, 20A10, 3C2B1, 5C6F3, 25E6, 18G12, 28F9, 1E4, B12, B2, B7, B9, 8C7F3, and H11 antibody, and has at least 80%, 90% or 95% or 98% sequence identity to the mouse monoclonal MNC2, MNE6, 20A10, 3C2B1, 5C6F3, 25E6, 18G12, 28F9, 1E4, B12, B2, B7, B9, 8C7F3, and H11 antibody. The heavy chain variable region of CDR1 and CDR2 may have at least 90% or 95% or 98% sequence identity to the particularly indicated antibody heavy chain variable region sequence set forth in the present application in the sequence listing, and the light chain variable region of CDR1 and CDR2 may have at least 90% or 95% or 98% sequence identity to the particularly indicated antibody heavy chain variable region sequence set forth in the present application in the sequence listing section. The heavy chain variable region of CDR3 may have at least 80% or 85% or 90% sequence identity to the particularly indicated antibody heavy chain variable region sequence set forth in the present application in the sequence listing, and the light chain variable region of CDR3 may have at least 80% or 85% or 90% sequence identity to the particularly indicated antibody heavy chain variable region sequence set forth in the present application in the sequence listing section.

[0023] The murine, camelid, human or humanized antibody, antibody fragment or antibody-like protein according to above may include complementarity determining regions (CDRs) in the heavy chain variable region and light chain variable region having at least 90% or 95% or 98% sequence identity to the particularly indicated antibody heavy chain CDR1, CDR2 or CDR3 region and light chain CDR1, CDR2 or CDR3 region sequences set forth in the present application in the sequence listing section.

[0024] In another aspect, the present invention is directed to an anti-MUC1* extracellular domain antibody or anti-N−10 antibody, which may be any of the antibodies described above, comprised of sequences represented by humanized IgG2 heavy chain, or humanized IgG1 heavy chain, paired with humanized Kappa light chain, or humanized Lambda light chain. The humanized IgG2 heavy chain may be SEQ ID NOS:53, humanized IgG1 heavy chain may be SEQ ID NO:57, humanized Kappa light chain may be SEQ ID NO:108, and humanized Lambda light chain may be SEQ ID NO:112, or a sequence having 90%, 95% or 98% sequence identity thereof.

[0025] In another aspect, the invention is directed to an anti-MUC1* extracellular domain antibody or anti-N−10 antibody comprised of sequences of a humanized MN-C2 represented by humanized IgG1 heavy chain, humanized IgG2 heavy chain, paired with humanized Lambda light chain, and humanized Kappa light chain.

[0026] In another aspect, the invention is directed to an anti-MUC1* extracellular domain antibody or anti-N−10 antibody comprised of sequences of a humanized MNC2, MNE6, 20A10, 3C2B1, 5C6F3, 25E6, 18G12, 28F9, 1E4, B12, B2, B7, B9, 8C7F3, or H11 represented by humanized IgG1 heavy chain or humanized IgG2 heavy chain, paired with humanized Lambda light chain, or humanized Kappa light chain.

[0027] In another aspect, the invention is directed to an antibody that is “like” MNC2, MNE6, 20A10, 3C2B1, 5C6F3, 25E6, 18G12, 28F9, 1E4, B12, B2, B7, B9, 8C7F3, or H11 in that they have the same or very similar pattern of binding to subsets of peptides derived from the PSMGFR peptide, also do not recognize a linear epitope, competitively inhibit the binding of NME1 or NME7_{AB} to MUC1*, recognize a MUC1 transmembrane cleavage product produced by cleavage by MMP9 or contain CDR sequences that are at least 80% homologous to the MN-E6, MN-C2, MN-18G12, MN-20A10, MN-25E6, MN-28F9, MN-5C6F3, MN-3C2B1, and MN-1E4 CDR consensus sequences.

[0028] In another aspect, the invention is directed to an antibody that binds to the extra cellular domain of a MUC1 that is devoid of the tandem repeat domain, which may be a cleavage product. In one aspect of the invention, the antibody binds to a peptide having the sequence of QFNQYKTEAASRYNLTISDVSVSDVPFPFSAQSGA (N−10). In one aspect of the invention, the antibody binds to a peptide having the sequence of ASRYNLTISDVSVSDVPFPFSAQSGA (N−19). In one aspect of the invention, the antibody binds to a peptide having the sequence of SVSDVPFPFSAQSGA (N−30). In one aspect of the invention, the antibody binds to a peptide having the sequence of FPFSAQSGA (N−36). Examples of such antibodies include but are not limited to monoclonal antibodies MNC2, MNE6, 20A10, 3C2B1, 5C6F3, 25E6, 18G12, 28F9, 1E4, B12, B2, B7, B9, 8C7F3, and H11. The heavy chain and light chain complementary determining region sequences for these antibodies are set forth in the present application in the sequence listing section.

[0029] In one aspect of the invention, one or more of these antibodies is administered to a patient diagnosed with or at risk of developing a cancer. The antibody may be human or humanized. The antibody may be murine or camelid. The antibody may be bivalent or monovalent. The antibody may be a fragment, including a single chain fragment, scFv, of one of the antibodies. The antibody or antibody fragment may be administered directly to the patient or incorporated into a bispecific antibody, a bispecific T cell engager, BiTE, or an antibody drug conjugate, ADC. The antibody or antibody fragment may be incorporated into a T cell receptor, TCR. The sequence of the antibody or antibody fragment may be incorporated into a chimeric antigen receptor, a “CAR”, or other similar entity, then introduced into an immune cell, ex vivo, then administered to a patient diagnosed with or at risk of developing a cancer. The immune cell, which may be a T cell or natural killer cell, may be derived from a donor or from the patient. In one aspect the immune cell is derived from a stem cell that has been directed to differentiate to that immune cell type in vitro. In one aspect, the antibody or a CAR containing sequences of the antibody may be expressed off of an inducible promoter. In one case the antibody or the CAR is expressed upon activation of the T cell or other immune cell. In one instance, the antibody or the CAR of the invention is expressed off of an NFAT response element. In another instance, CAR recognition of a target tumor cell activates the immune cell, leading to NFAT inducible expression of a cytokine, such as IL-12 or IL-18, or expression of a checkpoint inhibitor such as a PD1 inhibitor or a PDL-1 inhibitor. In yet another aspect, CAR recognition of a target tumor cell activates the immune cell, leading to NFAT inducible expression of a second CAR that contains sequences of a second antibody.

[0030] In another aspect, the invention is directed to a murine, camelid, human, humanized anti-MUC1* antibody or antibody fragment or antibody-like protein that binds to the N−10 peptide, according to above, which inhibits the binding of NME protein to MUC1*. The NME may be NME1, NME6, NME7_{AB}, NME7-X1, NME7 or NME8.

[0031] In yet another aspect, the invention is directed to a single chain variable fragment (scFv) comprising a heavy and light chain variable regions connected via a linker, further comprising CDRs of antibodies that bind to MUC1* extracellular domain. The CDRs may be derived from MNC2, MNE6, 20A10, 3C2B1, 5C6F3, 25E6, 18G12, 28F9, 1E4, B12, B2, B7, B9, 8C7F3, and H11. The scFv may be one that possesses the SEQ ID NOS:233, 235 and 237 (MN-E6); SEQ ID NOS:239, 241, and 243 (MN-C2)

[0032] In still another aspect, the invention is directed to a chimeric antigen receptor (CAR) comprising a scFv or a humanized variable region that binds to the extracellular domain of a MUC1 that is devoid of tandem repeats, a linker molecule, a transmembrane domain and a cytoplasmic domain. The single chain antibody fragment may bind to

[0033] (i) PSMGFR region of MUC1;

[0034] (ii) PSMGFR peptide;

[0035] (iii) a peptide having amino acid sequence of

(N-10)
(SEQ ID NO: 3)
QFNQYKTEAASRYNLTISDVSVSDVPFPFSAQSGA

[0036] (iv) a peptide having amino acid sequence of

(SEQ ID NO: 4)
ASRYNLTISDVSVSDVPFPFSAQSGA(N-19)

[0037] (v) a peptide having amino acid sequence of

(SEQ ID NO: 5)
NLTISDVSVSDVPFPFSAQSGA(N-23)

[0038] (vi) a peptide having amino acid sequence of

(SEQ ID NO: 6)
ISDVSVSDVPFPFSAQSGA(N-26)

[0039] (vii) a peptide having amino acid sequence of

(SEQ ID NO: 7)
SVSDVPFPFSAQSGA(N-30)

[0040] (viii) a peptide having amino acid sequence of

(SEQ ID NO: 8)
QFNQYKTEAASRYNLTISDVSVSDVPFPFS(N-10/C-5)

[0041] (ix) a peptide having amino acid sequence of

(SEQ ID NO: 9)
ASRYNLTISDVSVSDVPFPFS(N-19/C-5)

[0042] (x) a peptide having amino acid sequence of

(SEQ ID NO: 10)
FPFSAQSGA(N-36)

[0043] In the CAR as described above, portions of any of the variable regions set forth and described above, or combination thereof may be used in the extracellular domain of the CAR. The CAR also comprises a transmembrane region and a cytoplasmic tail that comprises sequence motifs that signal immune system activation. The extracellular domain may be comprised of murine, camelid, human, non-human, or humanized single chain antibody fragments of an MNC2, MNE6, 20A10, 3C2B1, 5C6F3, 25E6, 18G12, 28F9, 1E4, B12, B2, B7, B9, 8C7F3, and H11. Additional antibodies from which single chain antibody fragments may made include but are not limited to monoclonal antibodies that are like MNC2, MNE6, 20A10, 3C2B1, 5C6F3, 25E6, 18G12, 28F9, 1E4, B12, B2, B7, B9, 8C7F3, and H11 in that they have the same or very similar pattern of binding to subsets of peptides derived from the PSMGFR peptide, may not recognize a linear epitope or competitively inhibit the binding of NME1 or NME7_{AB} to MUC1*, or recognize a MUC1 transmembrane cleavage product produced by cleavage by MMP9 or contain CDR sequences that are at least 80% homologous to the MNC2, MNE6, 20A10, 3C2B1, 5C6F3, 25E6, 18G12, 28F9, 1E4, B12, B2, B7, B9, 8C7F3, and H11 CDR consensus sequences.

[0044] In the CARs as described above, the extracellular domain may include a murine, camelid, human, non-human or humanized single chain antibody fragments of an MN-E6 scFv set forth as SEQ ID NOS: 233, 235, or 237), MN-C2 scFv (SEQ ID NOS:239, 241, or 243), or 20A10 scFv as set forth as SEQ ID NOS:1574-1575, 25E6 scFv as set forth as SEQ ID NOS:1598-1599.

[0045] In any of the CARs described above, the cytoplasmic tail may be comprised of one or more of signaling sequence motifs CD3-zeta, CD27, CD28, 4-1BB, OX40, CD30, CD40, ICAm-1, LFA-1, ICOS, CD2, CD5, or CD7. In any of the CARs described above, the cytoplasmic tails may include mutations that dampen signaling. Such mutations include but are not limited to Tyrosines that are mutated to inhibit phosphorylation and signaling (Salter et al, 2018). In any of the CARs described above, the ITAMs of CD3-zeta may be mutated to inhibit or dampen signaling (Feucht et al 2019). In any of the CARs described above, the CD3 of the cytoplasmic tail may comprise mutations in the ITAMs including those referred to as 1XX. In any of the CARs described above, the T cell may be engineered to overexpress c-Jun as a method to inhibit T cell exhaustion (Lynn et al 2019).

[0046] In any of the CARs described above, the sequence may be CAR MN-E6 CD28/CD3z (SEQ ID NOS:298); CAR MN-E6 4-1BB/CD3z (SEQ ID NOS:301); CAR MN-E6 OX40/CD3z (SEQ ID NOS:617); CAR MN-E6 CD28/4-1BB/CD3z (SEQ ID NOS:304); CAR MN-E6 CD28/OX40/CD3z (SEQ ID NOS:619); CAR MN-C2 CD3z (SEQ ID NOS:607); CAR MN-C2 CD28/CD3z SEQ ID NOS:609); CAR MN-C2 4-1BB/CD3z (SEQ ID NOS:611 and SEQ ID NOS: 719); CAR MN-C2 OX40/CD3z (SEQ ID NOS:613); CAR MN-C2 CD28/4-1BB/CD3z (SEQ ID NOS: 307); CAR MN-C2 CD28/OX40/CD3z (SEQ ID NOS:615) or CAR MN-C3 4-1BB/CD3z (SEQ ID NOS: 601).

[0047] In another aspect, the invention is directed to a composition that includes at least two CARs with different extracellular domain units transfected into the same cell, which may be an immune cell, which may be derived from the patient requiring treatment for a cancer. The expression of the second CAR may be inducible and driven by the recognition of a target by the first CAR. The nucleic acid encoding the second CAR may be linked to an inducible promoter. The expression of the second CAR may be induced by an event that occurs specifically when the immune cell mounts an immune response to a target tumor cell. The antibody fragments of one or both of the CARs may direct the cell to a MUC1* positive tumor. The antibody fragments of the first and second CARs may bind to a MUC1* that is produced when MUC1 is cleaved by two different cleavage enzymes. Expression of the second CAR by the inducible promoter may be induced when the antibody fragment of the first CAR engages or binds to a MUC1 or MUC1* on the tumor. One way to do this is to induce expression of the second CAR when, or shortly after, an NFAT protein is expressed or translocated to the nucleus. For example, a sequence derived from an NFAT promoter region is put upstream of the gene for the second CAR. In this way, when the transcription factors that bind to the promoter of the NFAT protein are present in sufficient concentration to bind to and induce transcription of the NFAT protein, they will also bind to that same promoter that is engineered in front of the sequence for transcription of the second CAR. The NFAT protein may be NFAT1 also known as NFATc2, NFAT2 also known as NFATc or NFATc1, NFAT3 also known as NFATc4, NFAT4 also known as NFATc3, or NFAT5. In one aspect of the invention, the NFAT is NFATc1, NFATc3 or NFATc2. In one aspect of the invention, the NFAT is NFAT2 also known as NFATc1. SEQ ID NO:646 shows nucleic acid sequence of the upstream transcriptional regulatory region for NFAT2. The recognition unit of the second CAR may be an antibody fragment or a peptide, wherein the recognition units may bind to NME7, PD-1, PDL-1, or a checkpoint inhibitor.

[0048] The at least two CARs may have one CAR that does not have a tumor antigen targeting recognition unit and the other CAR does have a tumor antigen targeting recognition unit. In another aspect of the invention, one of the extracellular domain recognition units may bind to MUC1* extracellular domain. In another aspect of the invention, one of the extracellular domain recognition units may be an antibody fragment and the other is a peptide, which may be devoid of transmembrane and signaling motifs; the peptide may be a single chain antibody fragment or antibody. In another aspect of the invention, one of the recognition units may bind PD-1 or PDL-1. In another aspect of the invention, one extra cellular domain recognition unit is an anti-MUC1* antibody, antibody fragment or scFv chosen from the group consisting of MNC2, MNE6, 20A10, 3C2B1, 5C6F3, 25E6, 18G12, 28F9, 1E4, B12, B2, B7, B9, 8C7F3, and H11. The other recognition unit may be a CAR or may be an anti-NME7 antibody.

[0049] In another aspect, the invention is directed to a cell comprising a CAR with an extracellular domain that binds to the extra cellular domain of a MUC1 molecule that is devoid of tandem repeats. In another aspect, the invention is directed to a cell comprising a CAR with an extracellular domain that binds to a MUC1* transfected or transduced cell. The cell that includes the CAR may be an immune system cell, preferably a T cell, a natural killer cell (NK), a dendritic cell or mast cell.

[0050] In another aspect, the invention is directed to an engineered antibody-like protein.

[0051] In another aspect, the invention is directed to a method for treating a disease in a subject comprising administering an antibody according to any claim above, to a person suffering from the disease, wherein the subject expresses MUC1 aberrantly. The disease may be cancer, such as breast cancer, ovarian cancer, pancreatic cancer, lung cancer, colon cancer, gastric cancer or esophageal cancer.

[0052] In another aspect, the invention is directed to an antibody, antibody fragment or scFv comprising variable domain fragments derived from an antibody that binds to an extracellular domain of MUC1 isoform or cleavage product that is devoid of the tandem repeat domains. In a preferred embodiment, the antibody or antibody fragment binds to the N−10 peptide. The variable domain fragments may be derived from mouse monoclonal antibody MN-E6 (SEQ ID NO:13 and 66) or from the humanized MN-E6 (SEQ ID NO: 39 and 94), or from MN-E6 scFv (SEQ ID NO: 233, 235 and 237). Or, the variable domain fragments may be derived from mouse monoclonal antibody MN-C2 (SEQ ID NO: 119 and 169) or from the humanized MN-C2 (SEQ ID NO: 145 and 195), or from MN-C2 scFv (SEQ ID NO: 239, 241 and 243). Or, the variable domain may be derived from monoclonal antibodies MN-18G12, MN-20A10, MN-25E6, MN-28F9, MN-5C6F3, MN-3C2B1, or MN-1E4. The heavy chain and light chain complementary determining region sequences for these antibodies are also set forth in the sequence listing herein.

[0053] In another aspect, the invention is directed to a method for the treatment of a person diagnosed with, suspected of having or at risk of developing a MUC1 or MUC1* positive cancer involving administering to the person an effective amount of the antibody, antibody fragment or scFv described above, wherein the species may be murine, camelid, human or humanized.

[0054] In another aspect, the invention is directed to a polypeptide comprising at least two different scFv sequences, wherein one of the scFv sequences is a sequence that binds to extracellular domain of MUC1 isoform or cleavage product that is devoid of the tandem repeat domains. The polypeptide may bind to

[0055] (i) PSMGFR region of MUC1;

[0056] (ii) PSMGFR peptide;

[0057] (iii) a peptide having amino acid sequence of

(N-10)
(SEQ ID NO: 3)
QFNQYKTEAASRYNLTISDVSVSDVPFPFSAQSGA

[0058] (iv) a peptide having amino acid sequence of

(N-19)
(SEQ ID NO: 4)
ASRYNLTISDVSVSDVPFPFSAQSGA

[0059] (v) a peptide having amino acid sequence of

(N-23)
(SEQ ID NO: 5)
NLTISDVSVSDVPFPFSAQSGA

[0060] (vi) a peptide having amino acid sequence of

(N-26)
(SEQ ID NO: 6)
ISDVSVSDVPFPFSAQSGA

[0061] (vii) a peptide having amino acid sequence of

(SEQ ID NO: 7)
SVSDVPFPFSAQSGA (N-30)

[0062] (viii) a peptide having amino acid sequence of

(SEQ ID NO: 8)
QFNQYKTEAASRYNLTISDVSVSDVPFPFS (N-10/C-5)

[0063] (ix) a peptide having amino acid sequence of

(SEQ ID NO: 9)
ASRYNLTISDVSVSDVPFPFS (N-19/C-5)

[0064] (x) a peptide having amino acid sequence of

(SEQ ID NO: 10)
FPFSAQSGA (N-36)

[0065] The polypeptide may bind to a receptor on an immune cell, such as T cell, and in particular, CD3 on T-cell.

[0066] In another aspect, the invention is directed to a method of detecting presence of a cell that expresses MUC1* aberrantly, comprising contacting a sample of cells with the scFv-Fc described above and detecting for the presence of the binding of scFv-Fc to the cell. The cell may be cancer cell.

[0067] In another aspect, the invention is directed to a method for testing a subject's cancer for suitability of treatment with a composition comprising antibodies of the invention, which may be murine, camelid, human or humanized, or fragments thereof, or portions of the variable regions of antibodies MNC2, MNE6, 20A10, 3C2B1, 5C6F3, 25E6, 18G12, 28F9, 1E4, B12, B2, B7, B9, 8C7F3, or H11, comprising the steps of contacting a bodily specimen from the patient, in vitro, ex-vivo, or in vivo, with the antibody and determining that the patient exhibits aberrant expression of MUC1* compared to normal tissue or specimen. The antibody used in these diagnostics may be conjugated to an imaging agent.

[0068] In another aspect, the invention is directed to a method of treating a subject suffering from a disease comprising, exposing T cells from the subject, or from a donor, to MUC1* peptides wherein through various rounds of maturation, T cells develop MUC1* specific receptors, creating adapted T cells, and expanding and administering the adapted T cells to the donor patient who is diagnosed with, suspected of having, or is at risk of developing a MUC1* positive cancer. The MUC1* peptide is chosen from among the group:

[0069] (i) PSMGFR region of MUC1;

[0070] (ii) PSMGFR peptide;

[0071] (iii) a peptide having amino acid sequence of

QFNQYKTEAASRYNLTISDVSVSDVPFPFSAQSGA (N-10)

[0072] (iv) a peptide having amino acid sequence of

ASRYNLTISDVSVSDVPFPFSAQSGA (N-19)

[0073] (v) a peptide having amino acid sequence of

NLTISDVSVSDVPFPFSAQSGA (N-23)

[0074] (vi) a peptide having amino acid sequence of

ISDVSVSDVPFPFSAQSGA (N-26)

[0075] (vii) a peptide having amino acid sequence of

SVSDVPFPFSAQSGA (N-30)

[0076] (viii) a peptide having amino acid sequence of

QFNQYKTEAASRYNLTISDVSVSDVPFPFS (N-10/C-5)

[0077] (ix) a peptide having amino acid sequence of

ASRYNLTISDVSVSDVPFPFS (N-19/C-5)

[0078] (x) a peptide having amino acid sequence of

FPFSAQSGA (N-36)

[0079] In one aspect of the invention, the antibody that is administered to a patient for the treatment or prevention of a MUC1 or MUC1* positive cancer is selected for its ability to bind to the N−10 peptide of the PSMGFR. The antibody can be administered alone, as a monovalent antibody, as an scFv, or a fragment of the antibody can be incorporated into a CAR, a BiTE or an ADC.

[0080] In one aspect of the invention, the antibody that is administered to a patient for the treatment or prevention of a MUC1 or MUC1* positive cancer is selected for its inability to recognize a linear epitope of MUC1 or MUC1*. The antibody can be administered alone, as a monovalent antibody, as an scFv, or a fragment of the antibody can be incorporated into a CAR, a BiTE or an ADC.

[0081] In one aspect of the invention, the antibody that is administered to a patient for the treatment or prevention of a MUC1 or MUC1* positive cancer is selected for its ability to recognize the MUC1 transmembrane cleavage product after it has been cleaved by MMP9. The antibody can be administered alone, as a monovalent antibody, as an scFv, or a fragment of the antibody can be incorporated into a CAR, a BiTE or an ADC.

[0082] In one aspect of the invention, the antibody that is administered to a patient for the treatment or prevention of a MUC1 or MUC1* positive cancer is selected for its ability to competitively inhibit the binding of NME7_{AB} or NME7-X1 to the extra cellular domain of a MUC1 that is devoid of tandem repeats. The antibody can be administered alone, as a monovalent antibody, as an scFv, or a fragment of the antibody can be incorporated into a CAR, a BiTE or an ADC.

[0083] In another aspect, the invention is directed to a method of treating cancer in a patient comprising administering to the patient the immune cell of any of the above, in combination with a checkpoint inhibitor.

[0084] In the method above, any of the antibodies, or variable regions thereof, set forth in the following may be used: MNC2, MNE6, 20A10, 3C2B1, 5C6F3, 25E6, 18G12, 28F9, 1E4, B12, B2, B7, B9, 8C7F3, or H11.

[0085] In the method above, any of the variable regions set forth in the following may be used:

[0086] (i) an anti-MUC1* extracellular domain antibody or anti-N−10 antibody comprised of sequences of a humanized MN-E6 represented by humanized IgG2 heavy chain, or humanized IgG1 heavy chain, paired with humanized Kappa light chain, or humanized Lambda light chain;

[0087] (ii) an antibody of (i), wherein the humanized IgG2 heavy chain is SEQ ID NOS:53, humanized IgG1 heavy chain is SEQ ID NO:57, humanized Kappa light chain is SEQ ID NO:108, and humanized Lambda light chain is SEQ ID NO:112, or a sequence having 90%, 95% or 98% sequence identity thereof;

[0088] (iii) an anti-MUC1* extracellular domain antibody or anti-N−10 antibody comprised of sequences of a humanized MN-C2 represented by humanized IgG1 heavy chain, humanized IgG2 heavy chain, paired with humanized Lambda light chain, and humanized Kappa light chain;

[0089] (iv) an antibody of (iii), wherein the humanized IgG1 heavy chain MN-C2 (SEQ ID NOS:159) or IgG2 heavy chain (SEQ ID NOS:164) paired with Lambda light chain (SEQ ID NO:219) or Kappa light chain (SEQ ID NO:213), or a sequence having 90%, 95% or 98% sequence identity thereof;

[0090] In the method above, in the CAR, the extracellular domain may be comprised of humanized single chain antibody fragments of MNC2, MNE6, 20A10, 3C2B1, 5C6F3, 25E6, 18G12, 28F9, 1E4, B12, B2, B7, B9, 8C7F3, or H11. The extracellular domain may be comprised of humanized single chain antibody fragments of an MN-E6 scFv set forth as SEQ ID NOS: 233, 235, or 237), MN-C2 scFv (SEQ ID NOS:239, 241, or 243). In the CAR, the cytoplasmic tail may be comprised of one or more of signaling sequence motifs CD3-zeta, CD27, CD28, 4-1BB, OX40, CD30, CD40, ICAm-1, LFA-1, ICOS, CD2, CD5, or CD7.

[0091] The method above may include at least two CARs with different extracellular domain units transfected into the same cell. One of the extracellular domain recognition units may bind to MUC1* extracellular domain. One of the extracellular domain recognition units may bind to PD-1. One of the extracellular domain recognition units may be an antibody fragment and the other may be a peptide or an anti-MUC1* antibody fragment.

[0092] The method may include an immune cell transfected or transduced with a plasmid encoding a CAR and a plasmid encoding a non-CAR species that is expressed from an inducible promoter. The non-CAR species may be expressed from an inducible promoter that is activated by elements of an activated immune cell. The non-CAR species may be expressed from an NFAT inducible promoter. The NFAT may be NFATc1, NFATc3 or NFATc2. The cleavage enzyme may be MMP2, MMP3, MMP9, MMPP13, MMPP14, MMP16, ADAM10, ADAM17, or ADAM28, or a catalytically active fragment thereof. The non-CAR species may be a cytokine. The cytokine may be IL-7, IL-12, IL-15 or IL-18.

[0093] The present invention is directed to an antibody, or fragment thereof, for the diagnosis, treatment or prevention of cancers wherein the antibody specifically binds to the PSMGFR peptide (SEQ ID NO:2) or a fragment thereof of the peptide.

[0094] The antibody binds to the N−10 peptide (SEQ ID NO:3), N−19 peptide (SEQ ID NO:4), N−23 peptide (SEQ ID NO:5), N−26 peptide (SEQ ID NO:6), N−30 peptide (SEQ ID NO:7), N−10/C−5 peptide (SEQ ID NO:8), N−19/C−5 peptide (SEQ ID NO:9), or C−5 peptide (SEQ ID NO:825).

[0095] The antibody interacts with a peptide comprising conformational epitope SVSDV (SEQ ID NO:1751) and FPSA (SEQ ID NO:1747) within N−26 sequence ISDVSVSDVPFPFSAQSGA (SEQ ID NO:6), wherein mutation or deletion of FPFS (SEQ ID NO: 1747) destroys binding of the antibody or fragment thereof to the N−26 peptide.

[0096] The antibody interacts with a peptide comprising conformational epitope ASRYNLT (SEQ ID NO:1745), SVSDV (SEQ ID NO:1751), and FPSA (SEQ ID NO:1747) within the N−19 sequence ASRYNLT ISDVSVSDVPFPFSAQSGA (SEQ ID NO:4), wherein mutation or deletion of ASRYNLT (SEQ ID NO: 1745) destroys binding of the antibody or fragment thereof to the N−26 peptide.

[0097] The antibody does not bind to the C−10 peptide (SEQ ID NO:825).

[0098] The antibody binds to the N−10 peptide (SEQ ID NO:3), but not to the C−10 peptide (SEQ ID NO:825).

[0099] The antibody inhibits interaction between NME7A and MUC1*.

[0100] The antibody inhibits interaction between NME7A and PSMGFR peptide (SEQ ID NO:2).

[0101] The antibody inhibits interaction between NME7A and N−10 peptide (SEQ ID NO:3), N−19 peptide (SEQ ID NO:4), N−23 peptide (SEQ ID NO:5), N−26 peptide (SEQ ID NO:6), N−30 peptide (SEQ ID NO:7), N−10/C−5 peptide (SEQ ID NO:8), N−19/C−5 peptide (SEQ ID NO:9), or C−5 peptide (SEQ ID NO:825).

[0102] The antibody recognizes a MUC1 transmembrane enzymatic cleavage product.

[0103] In the above, the cleavage enzyme is MMP14 or MMP9 or a catalytically active fragment thereof of the enzyme.

[0104] The antibody binds to PSMGFR (SEQ ID NO:2) or fragment thereof in which presence of an amino acid sequence within PSMGFR (SEQ ID NO:2) induces binding of the antibody to the PSMGFR.

[0105] The amino acid sequence of the binding conformationally inducing peptide is present in N−10 peptide (SEQ ID NO:3).

[0106] The antibody does not bind to a linear form of the binding conformationally inducing peptide sequence wherein the linear form of the peptide is a denatured form.

[0107] The binding conformationally inducing peptide sequence is in the N−26 peptide sequence ISDVSVSDVPFPFSAQSGA (SEQ ID NO:6), wherein mutation or deletion of FPFS (SEQ ID NO:1747) destroys binding of the antibody or fragment thereof to the N−26 peptide.

[0108] The binding conformationally inducing peptide sequence is located within the N−19 sequence ASRYNLTISDVSVSDVPFPFSAQSGA (SEQ ID NO:4), wherein mutation or deletion of ASRYNLT (SEQ ID NO: 1745) destroys binding of the antibody or fragment thereof to the N−19 peptide.

[0109] The binding inducing peptide sequence may be located within the N−26 sequence ISDVSVSDVPFPFSAQSGA (SEQ ID NO:6), wherein mutation or deletion within FPFS (SEQ ID NO: 1747) destroys binding of the antibody or fragment thereof to PSMGFR.

[0110] The antibodies may have a consensus sequence.
[0111] heavy chain CDR1 comprises consensus sequence at least 90% identical to sequence: F or I at position 1, T at position 2, F at position 3, S at position 4, T, G, or R at position 5, Y at position 6, A, G or T at position 7, M at position 8 and S at position 9;
[0112] heavy Chain CDR2 comprises consensus sequence at least 90% identical to sequence: T at position 1, I or S at position 2, I or S at position 3, G or R at position 5, G or A at position 6, T or I at position 9, Y at position 10, Y at position 11, P or S at position 12 and DSVKG for positions 13-17;
[0113] heavy chain CDR3 comprises consensus sequence at least 90% identical to sequence: G, L, or N at position 2, G or T at position 4, Y at position 7, D or E at position 12, A at position 14, and Y at position 15;
[0114] light chain CDR1 comprises consensus sequence at least 90% identical to sequence: K or R at position 1, A or S at position 2, S at position 3, K or Q at position 4, S at position 5, L or V at position 6, L at position 7, T or S at position 10, Y at position 15, and I, L or M at position 16;
[0115] light Chain CDR2 comprises consensus sequence at least 90% identical to sequence: L or W, or S at position 1, A or T at position 2, S at position 3, N or T at position 4, L or R at position 5, E or A at position 6, and S at position 7; and
[0116] light chain CDR3 comprises consensus sequence at least 90% identical to sequence: Q at position 1, H or Q at position 2, S, Q or R at position 3, R, S or Y at position 4, E, L, or S at position 5, L or S at position 6, P or S at position 7, F or L at position 8 and T at position 9.

[0117] An antibody binding conformationally inducing peptide is within the N−26 sequence ISDVSVSDVPFPFSAQSGA (SEQ ID NO:6), wherein mutation or deletion within FPFS (SEQ ID NO: 1747), SVSDV (SEQ ID NO:1751), or ASRYNLT (SEQ ID NO: 1745) destroys binding of the antibody or fragment thereof to PSMGFR.

[0118] The antibody may have a further consensus sequence,

[0119] wherein
[0120] heavy chain CDR1 comprises consensus sequence at least 90% identical to sequence: F or I at position 1, T or A at position 2, F at position 3, S at position 4, T, G, or R at position 5, Y or F at position 6, A, G or T at position 7, M at position 8 and S at position 9;
[0121] heavy Chain CDR2 comprises consensus sequence at least 90% identical to sequence: T or A at position 1, I or S at position 2, I or S at position 3, N, S, T or G at position 4, G or R at position 5, G or A at position 6, G, T, or D at position 7, Y, K, H or S at position 8, T or I at position 9, Y or F at position 10, Y at position 11, P or S at position 12 and D at position 13, S or T at position 14, V or L at position 15 and KG for positions 16-17;
[0122] heavy chain CDR3 comprises consensus sequence at least 90% identical to sequence: G, L, or N at position 2, G, T, or Y at position 3, G or T at position 4, Y at position 7, Y, A, or G at position 10, M, D or F at position 11, D or E at position 12 and AY at position 14-15;
[0123] light chain CDR1 comprises consensus sequence at least 90% identical to sequence: K or R at position 1, A or S at position 2, S or R at position 3, S, Y, I or V at position 8, T or S at position 10, G, S, D, or Q at position 12, V, Y, K or N at position 13, N, S, or T at position 14, Y or F at position 15, and I, L or M at position 16;
[0124] light Chain CDR2 comprises consensus sequence at least 90% identical to sequence: A, T or V at position 2, S at position 3, N, T, or K at position 4, L or R at position 5, E, A, F or D at position 6, and S at position 7; and
[0125] light chain CDR3 comprises consensus sequence at least 90% identical to sequence: Q, F or W at position 1, H or Q at position 2, R, S, T, Y or N at position 4, E, L, S or H at position 5, L, S, V, D or Y at position 6, P or S at position 7, and T at position 9.

[0126] The antibody above which may be MNC2, having
[0127] heavy chain CDR1 comprises consensus sequence FTFSGYAMS;
[0128] heavy Chain CDR2 comprises consensus sequence TISSGGTYIYYPDSVKG;
[0129] heavy chain CDR3 comprises consensus sequence -LGGDNYYEYFDV--;
[0130] light chain CDR1 comprises consensus sequence RASKS--VSTSGYSYMH;
[0131] light Chain CDR2 comprises consensus sequence LASNLES; and
[0132] light chain CDR3 comprises consensus sequence QHSRELPFT.

[0133] MNE6, having
[0134] heavy chain CDR1 comprises consensus sequence FTFSRYGMS;
[0135] heavy Chain CDR2 comprises consensus sequence TISGGGTYIYYPDSVKG;
[0136] heavy chain CDR3 comprises consensus sequence DNYGRNYDYGMDY--;
[0137] light chain CDR1 comprises consensus sequence -------SATSSVSYIH;
[0138] light Chain CDR2 comprises consensus sequence STSNLAS; and
[0139] light chain CDR3 comprises consensus sequence QQRSSSPFT.

[0140] B2, having
[0141] heavy chain CDR1 comprises consensus sequence FAFSTFAMS;
[0142] heavy Chain CDR2 comprises consensus sequence AISNGGGYTYYPDTLKG;
[0143] heavy chain CDR3 comprises consensus sequence ----RYYDLYFDL--;
[0144] light chain CDR1 comprises consensus sequence RSSQNIV-HSNGNTYLE;
[0145] light Chain CDR2 comprises consensus sequence KVSNRFS; and
[0146] light chain CDR3 comprises consensus sequence FQDSHVPLT.

[0147] B7, having
[0148] heavy chain CDR1 comprises consensus sequence FTFSRYGMS;
[0149] heavy Chain CDR2 comprises consensus sequence TISSGGTYIYYPDSVKG;
[0150] heavy chain CDR3 comprises consensus sequence DNYGSSYDYAMDY--;
[0151] light chain CDR1 comprises consensus sequence RSSQTIV-HSNGNTYLE;
[0152] light Chain CDR2 comprises consensus sequence KVSNRFS; and
[0153] light chain CDR3 comprises consensus sequence FQDSHVPLT.

[0154] B9, having
[0155] heavy chain CDR1 comprises consensus sequence FTFSRYGMS;
[0156] heavy Chain CDR2 comprises consensus sequence TISSGGTYIYYPDSVKG;
[0157] heavy chain CDR3 comprises consensus sequence DNYGSSYDYAMDY--;
[0158] light chain CDR1 comprises consensus sequence -------SASSSVSYMH;
[0159] light Chain CDR2 comprises consensus sequence TTSNLAS; and
[0160] light chain CDR3 comprises consensus sequence QQRSSYPF-.

[0161] 8C7F3, having
[0162] heavy chain CDR1 comprises consensus sequence FTFSTYAMS;
[0163] heavy Chain CDR2 comprises consensus sequence AISNGGGYTYYPDSLKG;
[0164] heavy chain CDR3 comprises consensus sequence ----RYYDHYFDY--;
[0165] light chain CDR1 comprises consensus sequence --RASESVATYGNNFMQ;
[0166] light Chain CDR2 comprises consensus sequence LASTLDS; and
[0167] light chain CDR3 comprises consensus sequence QQNNEDPPT.

[0168] H11, having
[0169] heavy chain CDR1 comprises consensus sequence FAFSTFAMS;
[0170] heavy Chain CDR2 comprises consensus sequence AISNGGGYTYYPDTLKG;
[0171] heavy chain CDR3 comprises consensus sequence ----RYYDLYFDL--;
[0172] light chain CDR1 comprises consensus sequence RSSQNIV-HSNGNTYLE;
[0173] light Chain CDR2 comprises consensus sequence KVSNRFS; and
[0174] light chain CDR3 comprises consensus sequence FQDSHVPLT.

[0175] B12, having
[0176] heavy chain CDR1 comprises consensus sequence SYGVH;
[0177] heavy Chain CDR2 comprises consensus sequence VIWPGGSTNYNSTLMSRM;
[0178] heavy chain CDR3 comprises consensus sequence DRTPRVGAWFAY; and
[0179] light chain CDR1 comprises consensus sequence RASESVATYGNNFMQ;
[0180] light Chain CDR2 comprises consensus sequence LASTLDS; and
[0181] light chain CDR3 comprises consensus sequence QQNNEDPPT.

[0182] 20A10, having
[0183] heavy chain CDR1 comprises consensus sequence FTFSTYAMS;
[0184] heavy Chain CDR2 comprises consensus sequence -SIGRAGSTYYSDSVKG;
[0185] heavy chain CDR3 comprises consensus sequence ---GPIYNDYDEFAY;
[0186] light chain CDR1 comprises consensus sequence KSSQSVLYSSNQKNYLA;
[0187] light Chain CDR2 comprises consensus sequence WASTRES; and
[0188] light chain CDR3 comprises consensus sequence HQYLSSLT.

[0189] 3C2B1, having
[0190] heavy chain CDR1 comprises consensus sequence ITFSTYTMS;
[0191] heavy Chain CDR2 comprises consensus sequence TISTGGDKTYYSDSVKG;
[0192] heavy chain CDR3 comprises consensus sequence -GTTAMYYYAMDY;
[0193] light chain CDR1 comprises consensus sequence RASKS---ISTSDYNYIH;
[0194] light Chain CDR2 comprises consensus sequence LASNLES; and
[0195] light chain CDR3 comprises consensus sequence QHSRELPLT.

[0196] In another aspect, the invention is directed to an antibody, or fragment thereof, for the diagnosis, treatment or prevention of cancers that requires presence of antibody binding conformationally inducing peptide ASRYNLT (SEQ ID NO: 1745) of PSMGFR (SEQ ID NO:2). The antibody may be 25E6, having
[0197] heavy chain CDR1 comprises consensus sequence FTFSSYGMS;
[0198] heavy Chain CDR2 comprises consensus sequence TISNGGRHTFYPDSVKG;
[0199] heavy chain CDR3 comprises consensus sequence QTGTEGWFAY;
[0200] light chain CDR1 comprises consensus sequence KSSQSLLDSDGKTYLN;
[0201] light Chain CDR2 comprises consensus sequence LVSKLDS; and
[0202] light chain CDR3 comprises consensus sequence WQGTHFPQT.

[0203] In another aspect, the invention is directed to an antibody, or fragment thereof, for the diagnosis, treatment or prevention of cancers that requires presence of antibody binding conformationally inducing peptide SVSDV (SEQ ID NO:1761) of PSMGFR (SEQ ID NO:2). The antibody may be 5C6F3, having
[0204] heavy chain CDR1 comprises consensus sequence FTFSTYAMS;
[0205] heavy Chain CDR2 comprises consensus sequence AISNGGGYTYYPDSLKG;
[0206] heavy chain CDR3 comprises consensus sequence RYYDHYFDY;
[0207] light chain CDR1 comprises consensus sequence RSSQTIVHSNGNTYLE;
[0208] light Chain CDR2 comprises consensus sequence KVSNRFS; and
[0209] light chain CDR3 comprises consensus sequence FQDSHVPLT.

[0210] The antibody or fragment thereof according all of the above may be murine, camelid, human or humanized. The antibody fragment may be scFv or scFv-Fc, which variable regions thereof may be murine, camelid, human or humanized.

[0211] In another aspect, the invention is directed to a chimeric antigen receptor (CAR) comprising the antibody fragments of above, and may further comprise mutations in the co-stimulatory domain or CD3-zeta signaling domain. Tyrosines may be mutated in CD28 or 4-1BB. CD3-zeta may contain 1XX mutations.

[0212] In another aspect, the invention is directed to an immune cell comprising the CAR of above. Immune cell may be T cell, NK cell, dendritic cell, or mast cell.

[0213] In another aspect, the invention is directed to a cell composition expressed in a cell comprising a CARs of above, and second entity having a biological recognition unit that has a specificity that is different from that of the CAR. The second entity may bind PD-1, PDL-1, or other checkpoint inhibitor, or NME7, or a cytokine such as IL-12 or IL-18, or c-Jun.

[0214] In yet another aspect, the invention is directed to an immune cell engineered to express a nucleic encoding a CAR of above and a nucleic acid encoding a second entity as in any of the claims above wherein the second entity expressed from an inducible promoter. The second entity may be expressed from an inducible promoter that is activated by elements of an activated immune cell. The second entity may be expressed from an NFAT inducible promoter. NFAT may be NFATc1, NFATc3 or NFATc2. The second entity may be a cytokine such as IL-7, IL-15, or IL-18. The nucleic acids encoding the second entity may be inserted into a Foxp3 promoter or enhancer region, wherein the cytokine is IL-18. The cytokine may be expressed from an NFAT inducible promoter.

[0215] In another aspect, the invention is directed to a BiTE construct comprising the antibody fragment of above.

[0216] In yet another aspect, the invention is directed to an antibody drug conjugate (ADC) comprising the antibody or antibody fragment of above.

[0217] The present invention is directed to an antibody or fragment thereof that specifically binds to PSMGFR (SEQ ID NO:2) and N−10 (SEQ ID NO:3); and

[0218] does not bind to full-length MUC1;

[0219] does not bind to C−10 (SEQ ID NO:825);

[0220] competitively inhibits binding of NME1 or NME7_{AB} to MUC1* extra cellular domain or a PSMGFR peptide;

[0221] recognizes a MUC1* generated by cleavage by a cleavage enzyme;

[0222] recognizes a conformational epitope and not a linear epitope; or

[0223] is cancer selective by immunohistochemistry on tissues.

[0224] Four of the criteria (i)-(vi) may be satisfied. Five of the criteria (i)-(vi) may be satisfied. Six of the criteria (i)-(vi) may be satisfied. At least criteria (vi) may be satisfied. Cleavage enzyme may be MMP-9.

[0225] In all of the above, the cancer may be breast cancer, pancreatic cancer, ovarian cancer, lung cancer, colon cancer, gastric cancer or esophageal cancer.

[0226] The present invention is also directed to a method of diagnosing, treating or preventing cancer by administering the antibodies and fragments disclosed herein to a cancer patient in need thereof that has been identified as expressing MUC1 aberrantly and expressing truncated MUC1, such as MUC1*.

[0227] These and other objects of the invention will be more fully understood from the following description of the invention, the referenced drawings attached hereto and the claims appended hereto.

### BRIEF DESCRIPTION OF THE DRAWINGS

[0228] The patent or application file contains at least one drawing executed in color. Copies of this patent or patent application publication with color drawings will be provided by the Office upon request and payment of the necessary fee.

[0229] The present invention will become more fully understood from the detailed description given herein below, and the accompanying drawings which are given by way of illustration only, and thus are not limitative of the present invention, and wherein;

[0230] FIGS. 1A-1D show cell growth assay graphs of MUC1* positive cells treated with either bivalent ‘by’ anti-MUC1* antibody, monovalent ‘my’ or Fab, NM23-H1 dimers or NME7-AB. Bivalent anti-MUC1* antibodies stimulate growth of cancer cells whereas the monovalent Fab inhibits growth (FIG. 1A-1B). Classic bell-shaped curve indicates ligand induced dimerization stimulates growth. Dimeric NM23-H1, aka NME1, stimulates growth of MUC1* positive cancer cells but siRNA to suppress MUC1 expression eliminate its effect (FIG. 1C). NME7-AB also stimulates the growth of MUC1* positive cells (FIG. 1D).

[0231] FIGS. 2A-2I show results of ELISA assays. MUC1* peptides PSMGFR, PSMGFR minus 10 amino acids from the N-terminus aka N−10, or PSMGFR minus 10 amino acids from the C-terminus, aka C−10 are immobilized on the plate and the following are assayed for binding: NME7-AB (FIG. 2A), MN-C2 monoclonal antibody (FIG. 2B), MN-E6 monoclonal antibody (FIG. 2C), or dimeric NME1 (FIG. 2D). These assays show that NME1, NME7-AB and monoclonal antibodies MN-C2 and MN-E6 all require the first membrane proximal 10 amino acids of the MUC1* extracellular domain to bind. MUC1* peptides PSMGFR minus 10 amino acids from the N-terminus aka N−10, or PSMGFR minus 10 amino acids from the C-terminus, aka C−10, are immobilized on the plate and the following are assayed for binding: MN-C3 (FIG. 2E) and MN-C8 (FIG. 2F). FIG. 2G shows the amino acid sequence of the PSMGFR peptide. FIG. 2H shows the amino acid sequence of the N−10 peptide. FIG. 2I shows the amino acid sequence of the C−10 peptide.

[0232] FIGS. 3A-3C show results of competitive ELISA assays. The PSMGFR MUC1* peptide is immobilized on the plate and dimeric NM23-H1, aka NME1, is added either alone or after the MN-E6 antibody has been added (FIG. 3A). The same experiment was performed wherein NM23-H7, NME7-AB, is added alone or after MN-E6 has been added (FIG. 3B). Results show that MN-E6 competitively inhibits the binding of MUC1* activating ligands NME1 and NME7. In a similar experiment (FIG. 3C), PSMGFR or PSMGFR minus 10 amino acids from the N-terminus, aka N−10, is immobilized on the plate. Dimeric NM23-H1 is then added. Anti-MUC1* antibodies MN-E6, MN-C2, MN-C3 or MN-C8 are then tested for their ability to compete off the NM23-H1. Results show that although all three antibodies bind to the PSMGFR peptides, MN-E6 and MN-C2 competitively inhibit binding of the MUC1* activating ligands.

[0233] FIGS. 4A-4F show FACS scans of anti-MUC1* antibody huMN-C2scFv binding specifically to MUC1* positive cancer cells and MUC1* transfected cells but not MUC1* or MUC1 negative cells. ZR-75-1, aka 1500, MUC1* positive breast cancer cells were stained with 1:2 or 1:10 dilutions of the 1.5 ug/ml humanized MN-C2. After two washes, cells were stained with secondary antibody, Anti-Penta-His antibody conjugated to Alexa 488 (Qiagen) dilutions of 1:200 (FIG. 4A), 1:50 (FIG. 4B), or 1:10 (FIG. 4C) to detect the 6×His tag on the huMN-C2 scFv. FIG. 4A shows huMN-C2 binding to ZR-75-1 breast cancer cells where secondary antibody is added at a 1:200 dilution. FIG. 4B shows huMN-C2 binding to ZR-75-1 breast cancer cells where secondary antibody is added at a 1:50 dilution. FIG. 4C shows huMN-C2 binding to ZR-75-1 breast cancer cells where secondary antibody is added at a 1:10 dilution. Flow cytometric analysis revealed a concentration-dependent shift of a subset of cells, indicating specific binding, which is unseen in the absence of the MN-C2 scFv (FIG. 4A-4C). FIG. 4D shows anti-MUC1* antibody MN-E6 staining of MUC1 negative HCT-116 colon cancer cells transfected with the empty vector, single cell clone #8. FIG. 4E shows anti-MUC1* antibody MN-E6 staining of HCT-116 colon cancer cells transfected with MUC1* single cell clone #10. FIG. 4F shows anti-MUC1* antibody MN-E6 staining of ZR-75-1, aka 1500, MUC1* positive breast cancer cells. As the FACS scans show, both MN-C2 and MN-E6 only stain MUC1* positive cells and not MUC1 or MUC1* negative cells.

[0234] FIG. 5 shows a graph of an ELISA in which surface is coated with either the MUC1* PSMGFR peptide or a control peptide. Humanized MN-C2 scFv is then incubated with the surface, washed and detected according to standard methods. The ELISA shows that the huMN-C2 scFv binds to the MUC1* peptide with an EC−50 of about 333 nM.

[0235] FIGS. 6A-6B show graphs of cancer cell growth inhibition by MUC1* antibody variable region fragment humanized MN-C2 scFv. hMN-C2 scFv potently inhibited the growth of ZR-75-1, aka 1500, MUC1* positive breast cancer cells (FIG. 6A) and T47D MUC1* positive breast cancer cells (FIG. 6B) with approximately the same EC−50 as the in vitro ELISAs.

[0236] FIGS. 7A-7B show graphs of tumor growth in immune compromised mice that have been implanted with human tumors then treated with anti-MUC1* antibody MN-E6 Fab or mock treatment. Female nu/nu mice implanted with 90-day estrogen pellets were implanted with 6 million T47D human breast cancer cells that had been mixed 50/50 with Matrigel. Mice bearing tumors that were at least 150 mm³ and had three successive increases in tumor volume were selected for treatment. Animals were injected sub cutaneously twice per week with 80 mg/kg MN-E6 Fab and an equal number of mice fitting the same selection criteria were injected with vehicle alone (FIG. 7A). Male NOD/SCID mice were implanted with 6 million DU-145 human prostate cancer cells that had been mixed 50/50 with Matrigel. Mice bearing tumors that were at least 150 mm³ and had three successive increases in tumor volume were selected for treatment. Animals were injected sub-cutaneously every 48 hours with 160 mg/kg MN-E6 Fab and an equal number of mice fitting the same selection criteria were injected with vehicle alone (FIG. 7B). Tumors were measured independently by two researchers twice per week and recorded. Statistics were blindly calculated by independent statistician, giving a P value of 0.0001 for each. Anti-MUC1* Fab inhibited breast cancer growth and prostate cancer growth. Treatment had no effect on weight, bone marrow cell type or number.

[0237] FIG. 8 shows a graph of an ELISA wherein the surface was immobilized with either PSMGFR peptide, PSMGFR minus 10 amino acids from the N-terminus or minus 10 amino acids from the C-terminus. The huMN-E6 scFv-Fc bound to the PSMGFR peptide and to the PSMGFR N−10 peptide but not to the PSMGFR C−10 peptide. The parent MN-E6 antibody and the humanized MN-E6 require the C-terminal 10 amino acids of PSMGFR for binding.

[0238] FIGS. 9A-9B show graphs of ELISAs wherein the assay plate surface was immobilized with either PSMGFR peptide, PSMGFR minus 10 amino acids from the N-terminus or minus 10 amino acids from the C-terminus. The MN-C3 antibody variants were then assayed for binding to the various MUC1* peptides. FIG. 9A shows purified mouse monoclonal MN-C3 antibody; and FIG. 9B shows the humanized MN-C3 scFv-Fc. ELISAs show binding to the PSMGFR peptide as well as to certain deletion peptides.

[0239] FIGS. 10A-10J. FIGS. 10A10B are photographs of breast cancer tissue arrays. FIG. 10A was stained with VU4H5 which recognizes MUC1-FL (full length); FIG. 10B was stained with mouse monoclonal antibody MN-C2 which recognizes cancerous MUC1*. Following automated staining (Clarient Diagnostics), the tissue staining was scored using Allred scoring method which combines an intensity score and a distribution score. FIGS. 10C10F are color coded graphs showing the score calculated for MUC1 full-length staining for each patient's tissue. FIGS. 10G10J are color coded graphs showing the score calculated for MUC1* staining for each patient's tissue.

[0240] FIGS. 11A-11J. FIGS. 11A11B are photographs of breast cancer tissue arrays. FIG. 11A was stained with VU4H5 which recognizes MUC1-FL (full length); FIG. 11B was stained with mouse monoclonal antibody MN-C2 which recognizes cancerous MUC1*. Following automated staining (Clarient Diagnostics), the tissue staining was scored using Allred scoring method which combines an intensity score and a distribution score. FIGS. 11C-11F are color coded graphs showing the score calculated for MUC1 full-length staining for each patient's tissue. FIGS. 11G-11J are color coded graphs showing the score calculated for MUC1* staining for each patient's tissue.

[0241] FIGS. 12A-12H show photographs of normal breast and breast cancer tissues stained with humanized MN-E6-scFv-Fc biotinylated anti-MUC1* antibody at 2.5 ug/mL, then stained with a secondary streptavidin HRP antibody. FIG. 12A is a normal breast tissue. FIGS. 12B-12D are breast cancer tissues from patients as denoted in the figure. FIGS. 12E-12H are photographs of the corresponding serial sections that were stained with the secondary antibody alone.

[0242] FIGS. 13A-13F show photographs of normal breast and breast cancer tissues stained with humanized MN-E6-scFv-Fc biotinylated anti-MUC1* antibody at 2.5 ug/mL, then stained with a secondary streptavidin HRP antibody. FIG. 13A is a normal breast tissue. FIGS. 13B-13C are breast cancer tissues from patients as denoted in the figure. FIGS. 13D-13F are photographs of the corresponding serial sections that were stained with the secondary antibody alone.

[0243] FIGS. 14A-14H show photographs of breast cancer tissues stained with MN-E6 anti-MUC1* antibody at 10 ug/mL, then stained with a rabbit anti mouse secondary HRP antibody. FIGS. 14A-14D are breast cancer tissues from patient #300. FIGS. 14E-14H are breast cancer tissues from metastatic patient #291.

[0244] FIGS. 15A-15F show photographs of normal lung and lung cancer tissues stained with humanized MN-E6-scFv-Fc biotinylated anti-MUC1* antibody at 2.5 ug/mL, then stained with a secondary streptavidin HRP antibody. FIG. 15A is a normal lung tissue. FIGS. 15B15C are lung cancer tissues from patients as denoted in the figure. FIGS. 15D-15F are photographs of the corresponding serial sections that were stained with the secondary antibody alone.

[0245] FIGS. 16A-16F show photographs of normal lung and lung cancer tissues stained with humanized MN-E6-scFv-Fc biotinylated anti-MUC1* antibody at 2.5 ug/mL, then stained with a secondary streptavidin HRP antibody. FIG. 16A is a normal lung tissue. FIGS. 16B16C are lung cancer tissues from patients as denoted in the figure. FIGS. 16D-16F are photographs of the corresponding serial sections that were stained with the secondary antibody alone.

[0246] FIGS. 17A-17F show photographs of normal lung and lung cancer tissues stained with humanized MN-E6-scFv-Fc biotinylated anti-MUC1* antibody at 25 ug/mL, then stained with a secondary streptavidin HRP antibody. FIG. 17A is a normal lung tissue. FIGS. 17B-17C are lung cancer tissues from patients as denoted in the figure. FIGS. 17D-17F are photographs of the corresponding serial sections that were stained with the secondary antibody alone.

[0247] FIGS. 18A-18F show photographs of normal lung and lung cancer tissues stained with humanized MN-E6-scFv-Fc biotinylated anti-MUC1* antibody at 25 ug/mL, then stained with a secondary streptavidin HRP antibody. FIG. 18A is a normal lung tissue. FIGS. 18B-18C are lung cancer tissues from patients as denoted in the figure. FIGS. 18D-18F are photographs of the corresponding serial sections that were stained with the secondary antibody alone.

[0248] FIGS. 19A-19D show photographs of normal small intestine and cancerous small intestine tissues stained with humanized MN-E6-scFv-Fc biotinylated anti-MUC1* antibody at 5 ug/mL, then stained with a secondary streptavidin HRP antibody. FIG. 19A is a normal small intestine tissue. FIG. 19B is small intestine cancer from patient as denoted in the figure. FIGS. 19C-19D are photographs of the corresponding serial sections that were stained with the secondary antibody alone.

[0249] FIGS. 20A-20H show photographs of normal small intestine tissues stained with humanized MN-E6-scFv-Fc anti-MUC1* antibody at 50 ug/mL, then stained with a secondary goat-anti-human HRP antibody. FIGS. 20A-20D are normal small intestine tissue. FIGS. 20E-20H are photographs of the corresponding serial sections that were stained with the secondary antibody alone.

[0250] FIGS. 21A-21H show photographs of cancerous small intestine tissues stained with humanized MN-E6-scFv-Fc anti-MUC1* antibody at 50 ug/mL, then stained with a secondary goat-anti-human HRP antibody. FIGS. 21A-21D are cancerous small intestine tissue from a patient as denoted in figure. FIGS. 21E-21H are photographs of the corresponding serial sections that were stained with the secondary antibody alone.

[0251] FIGS. 22A-22H show photographs of cancerous small intestine tissues stained with humanized MN-E6-scFv-Fc anti-MUC1* antibody at 50 ug/mL, then stained with a secondary goat-anti-human HRP antibody. FIGS. 22A-22D are cancerous small intestine tissue from a patient as denoted in figure. FIGS. 22E-22H are photographs of the corresponding serial sections that were stained with the secondary antibody alone.

[0252] FIGS. 23A-23H show photographs of normal colon tissues stained with humanized MN-E6-scFv-Fc anti-MUC1* antibody at 50 ug/mL, then stained with a secondary goat-anti-human HRP antibody. FIGS. 23A-23D are normal colon. FIGS. 23E-23H are photographs of the corresponding serial sections that were stained with the secondary antibody alone.

[0253] FIGS. 24A-24H show photographs of colon cancer tissues stained with humanized MN-E6-scFv-Fc anti-MUC1* antibody at 50 ug/mL, then stained with a secondary goat-anti-human HRP antibody. FIGS. 24A-24D are colon cancer tissue from a metastatic patient as denoted in figure. FIGS. 24E-24H are photographs of the corresponding serial sections that were stained with the secondary antibody alone.

[0254] FIGS. 25A-25H show photographs of colon cancer tissues stained with humanized MN-E6-scFv-Fc anti-MUC1* antibody at 50 ug/mL, then stained with a secondary goat-anti-human HRP antibody. FIGS. 25A-25D are colon cancer tissue from a Grade 2 patient as denoted in figure. FIGS. 25E-25H are photographs of the corresponding serial sections that were stained with the secondary antibody alone.

[0255] FIGS. 26A-26H show photographs of colon cancer tissues stained with humanized MN-E6-scFv-Fc anti-MUC1* antibody at 50 ug/mL, then stained with a secondary goat-anti-human HRP antibody. FIGS. 26A-26D are colon cancer tissue from a metastatic patient as denoted in figure. FIGS. 26E-26H are photographs of the corresponding serial sections that were stained with the secondary antibody alone.

[0256] FIGS. 27A-27H show photographs of prostate cancer tissues stained with humanized MN-E6-scFv-Fc anti-MUC1* antibody at 50 ug/mL, then stained with a secondary goat-anti-human HRP antibody. FIGS. 27A-27D are prostate cancer tissue from a patient as denoted in figure.

[0257] FIGS. 27E-27H are photographs of the corresponding serial sections that were stained with the secondary antibody alone.

[0258] FIGS. 28A-28H show photographs of prostate cancer tissues stained with humanized MN-E6-scFv-Fc anti-MUC1* antibody at 50 ug/mL, then stained with a secondary goat-anti-human HRP antibody. FIGS. 28A-28D are prostate cancer tissue from a patient as denoted in figure.

[0259] FIGS. 28E-28H are photographs of the corresponding serial sections that were stained with the secondary antibody alone.

[0260] FIGS. 29A-29H show photographs of prostate cancer tissues stained with humanized MN-E6-scFv-Fc anti-MUC1* antibody at 50 ug/mL, then stained with a secondary goat-anti-human HRP antibody. FIGS. 29A-29D are prostate cancer tissue from a patient as denoted in figure. FIGS. 29E-29H are photographs of the corresponding serial sections that were stained with the secondary antibody alone.

[0261] FIGS. 30A-30F show photographs of a triple negative breast cancer array stained with anti-MUC1* antibody huMNC2scFv. The first score shown is the Allred score and the second is the tumor grade. The percentage of the array that scored zero, weak, medium or strong is graphed as a pie chart. FIG. 30A shows the pie chart of score of anti-MUC1* antibody staining. FIG. 30B shows a photograph of the array stained with the antibody. FIGS. 30C-30D show magnified photographs of two of the breast cancer specimens from the array. FIGS. 30E-30F show more magnified photographs of the portion of the specimen that is marked by a box.

[0262] FIGS. 31A-31F show photographs of an ovarian cancer array stained with anti-MUC1* antibody huMNC2scFv. The first score shown is the Allred score and the second is the tumor grade. The percentage of the array that scored zero, weak, medium or strong is graphed as a pie chart. FIG. 31A shows the pie chart of score of anti-MUC1* antibody staining. FIG. 31B shows a photograph of the array stained with the antibody. FIGS. 31C-31D show magnified photographs of two of the breast cancer specimens from the array. FIGS. 31E-31F show more magnified photographs of the portion of the specimen that is marked by a box.

[0263] FIGS. 32A-32F show photographs of a pancreatic cancer array stained with anti-MUC1* antibody huMNC2scFv. The first score shown is the Allred score and the second is the tumor grade. The percentage of the array that scored zero, weak, medium or strong is graphed as a pie chart. FIG. 32A shows the pie chart of score of anti-MUC1* antibody staining. FIG. 32B shows a photograph of the array stained with the antibody. FIGS. 32C-32D show magnified photographs of two of the breast cancer specimens from the array. FIGS. 32E-32F show more magnified photographs of the portion of the specimen that is marked by a box.

[0264] FIGS. 33A-33F show photographs of a lung cancer array stained with anti-MUC1* antibody huMNC2scFv. The first score shown is the Allred score and the second is the tumor grade. The percentage of the array that scored zero, weak, medium or strong is graphed as a pie chart. FIG. 33A shows the pie chart of score of anti-MUC1* antibody staining. FIG. 33B shows a photograph of the array stained with the antibody. FIGS. 33C-33D show magnified photographs of two of the breast cancer specimens from the array. FIGS. 33E-33F show more magnified photographs of the portion of the specimen that is marked by a box.

[0265] FIGS. 34A-34I show photographs of normal tissues stained with anti-MUC1* antibody huMNC2scFv.

[0266] FIGS. 35A-35D show FACS scans of cells expressing either no MUC1, MUC1* or full-length MUC1, wherein the cells were probed with either MNC2 or VU4H5. FIG. 35A shows MUC1 negative HCT-116 colon cancer cells probed with antibody MNC2. FIG. 35B shows HCT cells that have been transfected with MUC1* wherein the extra cellular domain is just the sequence of the PSMGFR peptide wherein the cells are probed with antibody MNC2. FIG. 35C shows HCT-MUC1-18 cells which are a cleavage resistant single cell clone of HCT cells transfected with full-length MUC1, also referred to herein as HCT-MUC1-41TR, and cells were probed with antibody MNC2. FIG. 35D shows HCT-MUC1-18 cells probed with antibody VU4H5 which is an antibody that recognizes the hundreds of tandem repeats epitopes in full-length MUC1. As can be seen in the figures, MNC2 recognizes an ectopic epitope that is not accessible in full-length MUC1.

[0267] FIGS. 36A-36D show Western blots and corresponding FACs analysis of HCT-116 cells which are a MUC1 negative colon cancer cell line, that were then stably transfected with either MUC1* or MUC1 full-length. The single cell clones that are shown are HCT-MUC1-41TR, and HCT-MUC1*. FIG. 36A shows a Western blot of the parent cell line HCT-116, HCT-MUC1-41TR and HCT-MUC1* wherein the gel has been probed with a rabbit polyclonal antibody, SDIX, that only recognizes cleaved MUC1. A visible band between 25 and 35 kDa can be readily seen in Lane 6, loaded with HCT-MUC1*, whereas there is only a faint band in Lanes 4 and 5, showing that only a small amount of MUC1 is cleaved in the HCT-MUC1-41Tr cells. There is no cleaved MUC1 present in the parent cell line HCT-116 loaded into Lanes 2 and 3. FIG. 36B is a Western blot that was probed with a mouse monoclonal antibody VU4H5 that recognizes the tandem repeats of full-length MUC1. As can be seen, only HCT-MUC1-41TR contains full-length MUC1.

[0268] FIG. 36C shows FACS scans showing that HCT-MUC1* is 95.7% positive for SDIX which only binds to MUC1* and essentially not at all for MUC1 full-length. FIG. 36D shows FACS scans that show that HCT-MUC1-41TR cells are 95% positive for full-length MUC1 and only about 11% positive for the cleaved form, MUC1*.

[0269] FIG. 37A-37C shows western blots and a bar graph of FACS analysis assessing the ability of MNC2 to recognize a full-length MUC1 after it has been cleaved by MMP9. FIG. 37A shows a Western blot of HCT-MUC1-18 cells, which are a cleavage resistant cell line, to which was added cleavage enzyme MMP9. The cell lysate fraction was run on a gel and probed with a polyclonal anti-PSMGFR antibody. The photo shows that in a dose dependent manner, MMP9 cleaved MUC1 to MUC1*, the ˜25 kDa species. FIG. 37B shows the Western blot of the conditioned media from the same experiment. The photo shows that the addition of cleavage enzyme MMP9, in a dose dependent manner, increased the release of the tandem repeat domain into the conditioned media. FIG. 37C shows FACS analysis of the experiment. The graphs show that the addition of MMP9, in a dose dependent manner, increased recognition of the cleavage product by anti-MUC1* antibody MNC2 and decreased the recognition of the full-length MUC1 which contains the tandem repeat domain.

[0270] FIG. 38 shows a photograph of a Western blot in which HCT-MUC1-18 cells, labeled here as HCT-18, a cleavage resistant single cell clone of HCT cells transfected with full-length MUC1, are treated with varying amounts of a catalytically active ADAM17 or MMP14. Shed MUC1 tandem repeat domain of full-length MUC1 is immunoprecipitated from the conditioned media, and run on a gel that is then probed with VU4H5 that binds to the tandem repeat epitopes. As can be seen, MMP14 also efficiently cleaves MUC1 full-length and sheds the tandem repeat containing extra cellular domain into the conditioned media. Cleavage enzyme ADAM17 did not cleave MUC1.

[0271] FIG. 39A-39B shows fluorescence activated cell sorting (FACS) measurements of human CD34+ hematopoietic stem cells of human bone marrow stained with anti-MUC1* monoclonal antibodies MNC3, MNC2, MNE6 or an isotype control antibody. The histogram of the FACS assay and the bar graph showing the data show that the MUC1* positive cells of the bone marrow are recognized by one anti-MUC1* antibody, MNC3 but not by MNE6 or MNC2. All three antibodies bind to the PSMGFR peptide. The great difference in the specificity of these antibodies suggests that MNC3 recognizes a MUC1*-like form created when MUC1 is cleaved by an enzyme that is different from MMP9.

[0272] FIG. 40A-40G shows the details of FACS analysis of the hematopoietic stem cells probed with either MNC3 or MNE6. FIG. 40A shows the FACS scatter plot of total bone marrow cells. FIG. 40B shows the FACS scatter plot of the CD34+ cells. FIG. 40C shows the FACS histogram of the CD34+ cells. FIG. 40D shows the FACS scatter plot of the earliest hematopoietic stem cells, which are CD34+/CD38−, stained with either MNC3 or MNE6. FIG. 40E shows the histogram of the experiment. FIG. 40F shows the histogram overlay of MNC3 binding to CD34+/CD38− cells versus MNE6. FIG. 40G shows the bar graph of that FACS experiment.

[0273] FIG. 41A-42H shows the details of FACS analysis of CD34+/CD38^{-/lo} hematopoietic stem cells probed with a polyclonal anti-PSMGFR antibody SDIX, MNE6 or MNC2. FIG. 41A shows the FACS scatter plot of the CD34+/CD38^{-/lo} population of cells. FIG. 41E shows a table of the detailed analysis. FIG. 41B shows the FACS scatter plot of the CD34+/CD38^{-/lo} population of cells probed with the anti-PSMGFR polyclonal antibody SDIX. FIG. 41F shows a table of the detailed analysis. FIG. 41C shows the FACS scatter plot of the CD34+/CD38^{-/lo} population of cells probed with MNE6. FIG. 41G shows a table of the detailed analysis. FIG. 41D shows the FACS scatter plot of the CD34+/CD38^{-/lo} population of cells probed with MNC2. FIG. 41H shows a table of the detailed analysis.

[0274] FIG. 42A-42H shows photographs of DU145 prostate cancer cells or T47D breast cancer cells that have been treated with either the Fab of anti-MUC1* antibody MNC2, MNE6, MNC3 or MNC8. The images show that cancer specific antibodies MNC2 and MNE6 effectively kill prostate and breast cancer cells while the monoclonal antibodies MNC3 and MNC8 do not.

[0275] FIG. 43 shows a graph of a PCR experiment comparing expression of a wide range of cleavage enzymes expressed in different cells lines, wherein the values have been normalized to those expressed in breast cancer cell line T47D. Cell lines that are compared are prostate cancer cell line DU145, HCT-MUC1-41TR that is a MUC1 negative colon cancer cell line transfected with a MUC1 whose extracellular domain is truncated after 41 tandem repeat units and that is not cleaved to the MUC1* form, T47D breast cancer cell line and CD34+ bone marrow cells.

[0276] FIG. 43 shows a graph of a PCR experiment in which the expression levels of various cleavage enzymes are measured in DU145 prostate cancer cells, HCT116+MUC1FL, also known as HCT-MUC1-18 a cell line expressing full-length MUC1, T47D breast cancer cells, and CD34+ hematopoietic stem cells of the bone marrow. The fold expression is relative to the expression of each cleavage enzyme in T47D breast cancer cells, set as 1.

[0277] FIG. 44 shows the graph of the PCR experiment of FIG. 43 but with the Y-axis maximum set to 5.

[0278] FIGS. 45A-45P show photographs of a CAR T co-culture assay in which the targeting antibody fragment of the CAR is huMNC2scFv wherein CAR44 has a CD8 transmembrane domain, followed by 41BB-3zeta and CAR50 has a CD4 transmembrane domain, followed by 41BB-3zeta. The target cancer cells are: HCT-FLR which is HCT-116 cells transfected with MUC1*₄₅ and HCT-MUC1-41TR, which is a stable single cell clone HCT-116 cell line that expresses MUC1 with an extracellular domain truncated after 41 tandem repeats and that does not get cleaved to the MUC1* form on its own. The HCT-MUC1-41TR cancer cells were also incubated with conditioned media from cells transfected with MMP9 or ADAM17 before co-culture with the CAR T cells. Conditioned media of the MMP9 or ADAM17 expressing cells were also incubated with APMA which is an activator of those cleavage enzymes. The images shown are an overlay of the 4× bright field image and the fluorescent image of the same showing cancer cells dyed with a red CMTMR lipophilic dye. FIGS. 45A, 45E, 45I, 45M show photographs of cells co-cultured with untransduced human T cells. FIGS. 45B, 45F, 45J, 45N show photographs of cells co-cultured with human T cells transduced with anti-MUC1* CAR44 at an MOI of 10. FIGS. 45C, 45G, 45K, 45O show photographs of cells co-cultured with human T cells transduced with anti-MUC1* CAR50 at an MOI of 10. FIGS. 45D, 45H, 45L, 45P show photographs of cells co-cultured with human T cells transduced with anti-MUC1* CAR44 at an MOI of 50, which increases transduction efficiency. FIGS. 45B, 45C, 45D show that both CAR44 and CAR50 transduced T cells recognized MUC1* expressed in these cancer cells, bound to them, induced clustering and killed many cancer cells. FIGS. 45F, 45G, 45H show that neither CAR44 nor CAR50 transduced T cells recognize full-length MUC1 expressed in HCT-MUC1-41TR cancer cells. There is no T cell induced clustering and the number of cancer cells has not decreased. FIGS. 45J, 45K, 45L show that activated MMP9 has cleaved full-length MUC1 to a MUC1* form that is recognized by both CAR44 and CAR50 transduced T cells. There is clearly visible CAR T cell induced clustering and a decrease in the number of cancer cells as they are killed. FIGS. 45N, 450, 45P show that activated ADAM17 has either not cleaved MUC1 or cleaved it at a position not recognized by MNC2. Neither huMNC2-CAR44 nor huMNC2-CAR50 transduced T cells recognized these cancer cells.

[0279] FIG. 46A-46T shows photographs of a CAR T co-culture assay in which the targeting antibody fragment of the CAR is MNC2 scFv wherein CAR44 has a CD8 transmembrane domain, followed by 41BB-3zeta and CAR50 has a CD4 transmembrane domain, followed by 41BB-3zeta. The target cancer cells are breast cancer T47D cells that were also incubated with conditioned media from cells transfected with MMP2, MMP9 or ADAM17 before co-culture with the MNC2-CAR T cells. In some cases, the conditioned media of the MMP2 and MMP9 expressing cells were also incubated with APMA, which is an activator of these cleavage enzymes. The images shown are an overlay of the 4× bright field image and the fluorescent image of the same showing cancer cells dyed with a red CMTMR lipophilic dye. As can be seen, the MNC2-CAR T cells only bind to and attack the target cancer cells that express the cleaved form, MUC1*.

[0280] FIGS. 47A-47I show photographs of cancer cells co-cultured with anti-MUC1* CAR T cells, wherein some of the cancer cells were pre-incubated with activated MMP9 prior to co-culture with the CAR T cells. The cancer cells shown in FIGS. 47A-47C are MUC1 negative colon cancer cell line HCT-116 that have been stably transfected to express MUC1*. The cancer cells shown in FIGS. 47D-47F are MUC1 positive breast cancer cell line T47Ds that express high levels of both MUC1 full-length and MUC1*. The cancer cells shown in FIGS. 47G-47I are MUC1 positive breast cancer cell line T47Ds that were pre-incubated with activated MMP9. The cells shown in FIGS. 47A, 47D and 47G were co-cultured with untransduced human T cells and are the controls. The cells shown in FIGS. 47B, 47E and 47H were co-cultured with human T cells that were transduced with huMNC2-CAR44 at an MOI of 10, wherein MOI stands for multiplicity of infection and the higher the MOI the more CARs are expressed on the T cells. The cells shown in FIGS. 47C, 47F and 47I were co-cultured with human T cells that were transduced with huMNC2-CAR44 at an MOI of 50. As can be seen in the photographs, the CAR44 T cells bind to the target MUC1* positive cancer cells, surrounding and killing them. Comparing the photograph FIG. 47I with the others, it can be seen that the cells that were pre-incubated with MMP9 become much more susceptible to CAR T killing when the antibody targeting head of the CAR recognizes MUC1*. It also demonstrates that MUC1 cleaved by MMP9 is recognized by huMNC2scFv.

[0281] FIG. 48 shows an xCelligence graph of T47D breast cancer cells in co-culture with either untransduced T cells, as a control, or huMNC2-CAR44 T cells over a 45 hour period. After 18 hours of cancer cell growth, a catalytic sub-unit MMP9 was added to some of the cells. At 25 hours, T cells were added. As can be seen, huMNC2-CAR44 T cell killing is greatly improved when the T47D cells are pre-incubated with cleavage enzyme MMP9. In the xCelligence system, target cancer cells, which are adherent, are plated onto electrode array plates. Adherent cells insulate the electrode and increase the impedance. The number of adherent cancer cells is directly proportional to impedance. T cells are not adherent and do not contribute to impedance. Therefore, increasing impedance reflects growth of cancer cells and decreasing impedance reflects killing of cancer cells.

[0282] FIG. 49 shows an xCelligence graph of DU145 prostate cancer cells in co-culture with either untransduced T cells, as a control, or huMNC2-CAR44 T cells over a 45 hour period. After 18 hours of cancer cell growth, a catalytic sub-unit MMP9 was added to some of the cells. At 25 hours, T cells were added. As can be seen, huMNC2-CAR44 T cell killing is not affected by pre-incubation with cleavage enzyme MMP9. DU145 cancer cells express a significantly lower amount of MUC1 which includes the full-length form as well as MUC1*. The lower density of MUC1 full-length does not sterically hinder T cell access to the membrane proximal MUC1*.

[0283] FIG. 50 shows a bar graph of a PCR experiment measuring the amount of MUC1 expressed by a panel of cell lines and primary cells, comprised of normal cells as well as cancer cells.

[0284] FIG. 51A-51B shows a bar graph of an ELISA assay measuring the amount of interferon gamma, IFN-g, secreted by huMNC2-CAR44 human T cells after co-culture with the normal cells or the HCT-MUC1* cancer cells for 72 hours. FIG. 51A shows the results of the experiment where the CAR44 T cell to target cell ratio was 1:1. FIG. 51B shows the results of the experiment where the CAR44 T cell to target cell ratio was 0.5:1.

[0285] FIG. 52A-52B shows a bar graph of an ELISA assay measuring the amount of interleukin-2, IL-2, secreted by huMNC2-CAR44 human T cells after co-culture with the normal cells or the HCT-MUC1* cancer cells for 72 hours. FIG. 52A shows the results of the experiment where the CAR44 T cell to target cell ratio was 1:1. FIG. 52B shows the results of the experiment where the CAR44 T cell to target cell ratio was 0.5:1.

[0286] FIG. 53A-53J shows bar graphs of FACS analysis of live versus dead markers and photographs of normal cells versus cancer cells after co-culture with huMNC2-CAR44 T cells. FIG. 53A.1 shows the bar graph of FACS analysis of live versus dead cells after HCT-MUC1* cancer cells were co-cultured with huMNC2-CAR44 T cells. FIG. 53A.2 and FIG. 53A.3 show the photographs of the experiment described in FIG. 53A.1. FIG. 53B.1 shows the bar graph of FACS analysis of live versus dead cells after MCF-12A normal breast cells were co-cultured with huMNC2-CAR44 T cells. FIG. 53B.2 and FIG. 53B.3 show the photographs of the experiment described in FIG. 53B.1. FIG. 53C.1 shows the bar graph of FACS analysis of live versus dead cells after THLE-3 normal liver cells were co-cultured with huMNC2-CAR44 T cells. FIG. 53C.2 and FIG. 53C.3 show the photographs of the experiment described in FIG. 53C.1. FIG. 53D.1 shows the bar graph of FACS analysis of live versus dead cells after T/G HA-HSMC normal heart cells were co-cultured with huMNC2-CAR44 T cells. FIG. 53D.2 and FIG. 53D.3 show the photographs of the experiment described in FIG. 53D.1. FIG. 53E.1 shows the bar graph of FACS analysis of live versus dead cells after Hs1.Tes normal testes cells were co-cultured with huMNC2-CAR44 T cells.

[0287] FIG. 53E.2 and FIG. 53E.3 show the photographs of the experiment described in FIG. 53E.1. FIG. 53F.1 shows the bar graph of FACS analysis of live versus dead cells after HEK-293 MUC1 negative cells were co-cultured with huMNC2-CAR44 T cells. FIG. 53F.2 and FIG. 53F.3 show the photographs of the experiment described in FIG. 53F.1. FIG. 53G.1 shows the bar graph of FACS analysis of live versus dead cells after HRCE normal kidney cells were co-cultured with huMNC2-CAR44 T cells. FIG. 53G.2 and FIG. 53G.3 show the photographs of the experiment described in FIG. 53G.1. FIG. 53H.1 shows the bar graph of FACS analysis of live versus dead cells after CCD-18Lu normal lung cells were co-cultured with huMNC2-CAR44 T cells. FIG. 53H.2 and FIG. 53H.3 show the photographs of the experiment described in FIG. 53H.1. FIG. 53I.1 shows the bar graph of FACS analysis of live versus dead cells after HBEC−5i normal brain cells were co-cultured with huMNC2-CAR44 T cells. FIG. 53I.2 and FIG. 53I.3 show the photographs of the experiment described in FIG. 53I.1. FIG. 53J.1 shows the bar graph of FACS analysis of live versus dead cells after Hs.738.St/Int normal stomach and intestine cells were co-cultured with huMNC2-CAR44 T cells. FIG. 53J.2 and FIG. 53J.3 show the photographs of the experiment described in FIG. 53J.1.

[0288] FIG. 54 shows photographs of a breast cancer tissue array (CB—insert array number) in which for each patient there is a specimen from the primary tumor plus a specimen from that patient's metastasis. As can be seen in the figure, most often the metastasis expresses more MUC1* than the primary tumor.

[0289] FIGS. 55A-55H show the cytotoxic effect of huMNC2-CAR44 T cells on MUC1* positive DU145 prostate cancer cells as measured by a variety of assays. FIG. 55A is a fluorescent photograph of untransduced T cells co-cultured with the prostate cancer cells, wherein granzyme B is stained with a red fluorophore. FIG. 55B shows merging of DAPI and granzyme B. FIG. 55C is a fluorescent photograph of huMNC2-CAR44 T cells co-cultured with the prostate cancer cells, wherein granzyme B is stained with a red fluorophore. FIG. 55D shows merging of DAPI and granzyme B. FIG. 55E is a FACS scan for fluorescently labeled granzyme B for untransduced T cells incubated with the cancer cells. FIG. 55F is a FACS scan showing a positive increase in fluorescently labeled granzyme B for huMNC2-CAR44 T cells incubated with the cancer cells.

[0290] FIG. 55G is a graph of the mean fluorescent intensity. FIG. 55H is an xCELLigence scan tracking the real-time killing of DU145 cancer cells by huMNC2-CAR44 T cells (blue trace) but not by untransduced T cells (green).

[0291] FIGS. 56A-56H show the cytotoxic effect of huMNC2-CAR44 T cells on MUC1* positive CAPAN-2 pancreatic cancer cells as measured by a variety of assays. FIG. 56A is a fluorescent photograph of untransduced T cells co-cultured with the pancreatic cancer cells, wherein granzyme B is stained with a red fluorophore. FIG. 56B shows merging of DAPI and granzyme B. FIG. 56C is a fluorescent photograph of huMNC2-CAR44 T cells co-cultured with the pancreatic cancer cells, wherein granzyme B is stained with a red fluorophore. FIG. 56D shows merging of DAPI and granzyme B. FIG. 56E is a FACS scan for fluorescently labeled granzyme B for untransduced T cells incubated with the cancer cells. FIG. 56F is a FACS scan showing a positive increase in fluorescently labeled granzyme B for huMNC2-CAR44 T cells incubated with the cancer cells. FIG. 56G is a graph of the mean fluorescent intensity. FIG. 56H is an xCELLigence scan tracking the real-time killing of CAPAN-2 cancer cells by huMNC2-CAR44 T cells (blue trace) but not by untransduced T cells (green).

[0292] FIGS. 57A-57C show xCELLigence scans tracking the real-time killing of MUC1* positive cancer cells, but not MUC1* negative cells, by huMNC2-CAR44 T cells. FIG. 57A shows that huMNC2-CAR44 T cells effectively kill HCT colon cancer cells that have been stably transfected with MUC1*. FIG. 57B shows that huMNC2-CAR44 T cells have almost no effect on HCT-MUC1-41TR, which is a MUC1 negative cancer cell that has been stably transfected with a MUC1 full-length. In this cell line only about 10% of the cells have MUC1 cleaved to MUC1*.

[0293] FIG. 57C shows that huMNC2-CAR44 T cells have no effect on HCT-116 cells, which is a MUC1 negative colon cancer cell line.

[0294] FIG. 58A- 58F shows photographs NOD/SCID/GAMMA mice in an IVIS instrument measuring photon emission from tumor cells after mice were treated with nothing, PBS, untransduced human T cells or huMNC2-CAR44 T cells. Mice had been injected sub-cutaneously with HCT-MUC1* tumor cells that had been made Luciferase positive. Ten (10) minutes before the IVIS photographs were taken, the mice were injected into the intraperitoneal (ip) space with the Luciferase substrate, Luciferin. FIG. 58A shows the tumor bearing mice that had only been treated with phosphate buffered saline, PBS. FIG. 58B shows the tumor bearing mice that had only been treated with untransduced T cells. FIG. 58C shows the tumor bearing mice that had been treated with a single dose of huMNC2-CAR44 T cells. FIG. 58D shows color scale of the images.

[0295] FIG. 58E shows Kaplan-Meier survival curves of the experiment. FIG. 58F shows a table detailing the molecular makeup of the human T cells that were isolated from the mouse blood after sacrifice.

[0296] FIG. 59A- 59C shows photographs NOD/SCID/GAMMA mice in an IVIS instrument measuring photon emission from tumor cells after mice were treated with nothing, PBS or huMNC2-CAR44 T cells. Mice had been injected sub-cutaneously with T47D-wt breast cancer cells or T47D+more MUC1*, which is a mixed population of cells wherein 95% of the cells were T47D cells that had been stably transfected with even more MUC1*. Both T47D-wt and T47D plus more MUC1* cells had been made Luciferase positive. Ten (10) minutes before the IVIS photographs were taken, the mice were injected into the intraperitoneal (ip) space with the Luciferase substrate, Luciferin. FIG. 59A shows the tumor bearing mice that had only been treated with phosphate buffered saline, PBS. FIG. 59B shows the T47D-wt tumor bearing mice that had been treated with two (2) doses of huMNC2-CAR44 T cells. FIG. T90.1C shows the T47D-MUC1* tumor bearing mice that had been treated with two (2) doses of huMNC2-CAR44 T cells.

[0297] FIG. 60A- 60C shows photographs NOD/SCID/GAMMA mice in an IVIS instrument measuring photon emission from tumor cells after mice were treated with nothing, PBS, untransduced T cells or huMNC2-CAR44 T cells. Mice had been injected sub-cutaneously with a mixed population of 70% T47D-wt breast cancer cells and 30% T47D cells that had been transfected with even more MUC1*. Both cell types had been made Luciferase positive. Ten (10) minutes before the IVIS photographs were taken, the mice were injected into the intraperitoneal (ip) space with the Luciferase substrate, Luciferin. FIG. 60A shows the tumor bearing mice that had only been treated with phosphate buffered saline, PBS. FIG. 60B shows tumor bearing mice that had only been treated with untransduced T cells. FIG. 60C shows the tumor bearing mice that had been treated with two (2) doses of huMNC2-CAR44 T cells.

[0298] FIGS. 61A-61J show fluorescent photographs of mice taken on an IVIS instrument. NSG (NOD/SCID/GAMMA) immune compromised mice that on Day 0 were sub-cutaneously injected into the flank with 500K human BT-20 cells which are a MUC1* positive triple negative breast cancer cell line. The cancer cells had been stably transfected with Luciferase. Tumors were allowed to engraft. On Day 6 after IVIS measurement, animals were given a one-time injection of 10 million of either human T cells transduced with huMNC2-scFv-CAR44 or untransduced T cells. 5 million T cells were injected intra-tumor and 5 million were injected into the tail vein. 10 minutes prior to IVIS photographs, mice were IP injected with Luciferin, which fluoresces after cleavage by Luciferase, thus making tumor cells fluoresce. FIGS. 61A, 61D, 61G show photographs of mice that were treated with huMNC2-scFv-CAR44 T cells that had been pre-stimulated by co-culturing for 24 hours with 4 μm beads to which was attached a synthetic MUC1*, PSMGFR peptide 24 hours prior to administration: Protocol 1. FIGS. 61B, 61E, 61H show photographs of mice that were treated with huMNC2-scFv-CAR44 T cells that had been pre-stimulated by twice co-culturing for 24 hours with MUC1* positive cancer cells 24 hours prior to administration: Protocol 2. FIGS. 61C, 61F, 61I show photographs of mice that were treated with untransduced human T cells. FIG. 61J is a color scale relating fluorescence in photons/second to color.

[0299] FIGS. 62A-62M show fluorescent photographs of mice taken on an IVIS instrument. NSG (NOD/SCID/GAMMA) immune compromised mice that on Day 0 were injected into the intraperitoneal cavity (IP) with 500K human SKOV-3 cells which are a MUC1* positive ovarian cancer cell line. The cancer cells had been stably transfected with Luciferase. Tumors were allowed to engraft. On Day 4, animals were injected into the intraperitoneal space with 10M either human T cells transduced with huMNC2-scFv-CAR44, untransduced T cells or PBS. On Day 11, animals were injected again except that half the cells were injected into the tail vein and the other half was IP injected. Animals were imaged by IVIS on Days 3, 7, 10 and 15. 10 minutes prior to IVIS photographs, mice were IP injected with Luciferin, which fluoresces after cleavage by Luciferase, thus making tumor cells fluoresce. FIGS. 62A, 62D, 62G, and 62J show photographs of mice that were treated with huMNC2-scFv-CAR44 T cells that had been pre-stimulated by co-culturing for 24 hours with 1 μm beads to which was attached a synthetic MUC1*, PSMGFR peptide 24 hours prior to administration. FIGS. 62B, 62E, 62H, and 62K show photographs of mice that were treated with untransduced human T cells. FIGS. 62C, 62F, 62I, and 62L show photographs of mice that were treated with PBS. FIGS. 62A, 62B and 62C are IVIS images taken Day 3 prior to CAR T, T cell or PBS administration. FIGS. 62D, 62E and 62F show IVIS images of animals on Day 7, just four (4) days after treatment. FIGS. 62G, 62H, and 62I show IVIS images of animals on Day 10.

[0300] FIGS. 62J, 62K, and 62L show IVIS images of animals on Day 15 FIG. 62M is the IVIS color scale relating fluorescence in photons/second to color.

[0301] FIG. 63A shows a graph of an ELISA binding assay in which various monoclonal antibodies are tested for their ability to bind to the PSMGFR peptide, the N−10, C−10, N+20/C−27, or the N+9/C−9 peptide, wherein the concentration of the antibody was at 10 ug/mL or 1 ug/mL. Note that anti-MUC1* monoclonal antibodies C2 and E6, which have been demonstrated to be cancer specific, bind to the PSMGFR peptide, still bind if the 10 N-terminal amino acids are missing, but do not bind if the 10 or 9 C-terminal amino acids are missing.

[0302] FIG. 63B shows the amino acid sequences for the N+20/C−27 peptide, the N+9/C−9 peptide, the PSMGFR peptide, the N−10 peptide, and the C−10 peptides (top to bottom).

[0303] FIG. 64A-64B shows a graph of an ELISA binding assay. The antibodies being tested were derived from animals immunized with the PSMGFR peptide. The first selection criteria was to confirm that the antibodies bound to the immunizing PSMGFR peptide. FIG. 64A shows a graph of an ELISA of selected antibodies that were further tested to determine their ability to bind to the PSMGFR peptide, the N−10, the C−10, N+20/C−27, or N+9/C−9 peptide. All the antibodies except 18B4 were able to bind to the N−10 peptide. 18B4 recognized N+20/C−27 but not the N−10 peptide, implying that its cognate epitope lies within the GTINVHDVET sequence. All except 20A10 and C2 showed some binding to the C−10 and N+9/C−9 peptide, showing that both 20A10 and C2 require the 10 membrane proximal amino acids for binding. C2, which requires the 10 membrane proximal amino acids for binding has been demonstrated to be cancer specific. FIG. 64B shows the sequences of the various peptides. The color of the bars for each antibody in the ELISA graph are color coded to match the deductive cognate sequence, or a portion thereof, of that antibody.

[0304] FIG. 65A-65B shows a graph of an ELISA binding assay in which various monoclonal antibodies are tested for their ability to bind to the PSMGFR peptide, the N−10, the C−10, N+20/C−27, or N+9/C−9 peptide. The antibodies being tested were derived from animals immunized with the N+20/C−27 peptide. The first selection criteria was to confirm that the antibodies bound to the immunizing N+20/C−27 peptide. FIG. 65A shows a graph of ELISA binding assay that tests the ability of each antibody to bind to various peptides. Although these antibodies were raised against the N+20/C−27 peptide, all but one, 45C11, still bind to the PSMGFR peptide. The binding of 45C11 is weak but deductive reasoning shows that the cognate epitope must lie within the SNIKFRPGSVV sequence. 1E4 was able to bind to the N+20/C−27 peptide, the PSMGFR and the N−10 peptide, consistent with the idea that its epitope must lie within the QFNQYKTE sequence. FIG. 65B shows the sequences of the various peptides. The color of the bars for each antibody in the ELISA graph are color coded to match the deductive cognate sequence, or a portion thereof, of that antibody.

[0305] FIG. 66A-66B shows a graph of an ELISA binding assay in which various monoclonal antibodies are tested for their ability to bind to the PSMGFR peptide, the N−10, the C−10, N+20/C−27, or N+9/C−9 peptide. The antibodies being tested were derived from animals immunized with the N+9/C−9 peptide. The first selection criteria was to confirm that the antibodies bound to the immunizing N+9/C−9 peptide. FIG. 66A shows a graph of the ELISA assay. All but one, 39H5, were only able to bind to the immunizing peptide, N+9/C−9. 39H5 showed very weak binding to the PSMGFR and N−10 peptide, consistent with the idea that at least a portion of its cognate epitope must lie within the QFNQYKTE sequence. FIG. 66B shows the sequences of the various peptides. The color of the bars for each antibody in the ELISA graph are color coded to match the deductive cognate sequence, or a portion thereof, of that antibody.

[0306] FIG. 67A-67D shows results of ELISA assays to further define antibody epitopes within the MUC1 or MUC1* extra cellular domain. The antibodies shown in this figure were all generated by immunizing animals with the PSMGFR peptide. Binding assays tested antibodies for their ability to bind to peptides N−19, N−26, N−30, N−10/C−5, N−19/C−5, PSMGFR, N−10 and C−10, which are all subsets of the PSMGFR peptide and numbering refers back to the PSMGFR peptide. FIG. 67A shows the binding of the various antibodies to the various peptides. FIG. 67B shows the sequence of the PSMGFR peptide that has been extended 20 amino acids at the N-terminus. FIG. 67C shows the sequences of the PSMGFR-derived subset peptides. FIG. 67D shows the sequences that comprise all or part of the epitope that is essential for antibody recognition.

[0307] FIG. 68A-68D shows results of ELISA assays to further define antibody epitopes within the MUC1 or MUC1* extra cellular domain. The antibodies shown in this figure were all generated by immunizing animals with the N+20/C−27 peptide. Binding assays tested antibodies for their ability to bind to peptides N−19, N−26, N−30, N−10/C−5, N−19/C−5, PSMGFR, N−10 and C−10, which are all subsets of the PSMGFR peptide and numbering refers back to the PSMGFR peptide. FIG. 68A shows the binding of the various antibodies to the various peptides. FIG. 68B shows the sequence of the PSMGFR peptide that has been extended 20 amino acids at the N-terminus. FIG. 68C shows the sequences of the PSMGFR-derived subset peptides. FIG. 68D shows the sequences that comprise all or part of the epitope that is essential for antibody recognition.

[0308] FIGS. 69A-69D show results of ELISA assays to further define antibody epitopes within the MUC1 or MUC1* extra cellular domain. The antibodies shown in this figure were all generated by immunizing animals with the N+9/C−9 peptide. Binding assays tested antibodies for their ability to bind to peptides N−19, N−26, N−30, N−10/C−5, N−19/C−5, PSMGFR, N−10 and C−10, which are all subsets of the PSMGFR peptide and numbering refers back to the PSMGFR peptide. FIG. 69A shows the binding of the various antibodies to the various peptides. FIG. 69B shows the sequence of the PSMGFR peptide that has been extended 20 amino acids at the N-terminus. FIG. 69C shows the sequences of the PSMGFR-derived subset peptides. FIG. 69D shows the sequences that comprise all or part of the epitope that is essential for antibody recognition.

[0309] FIG. 70A shows a graph of an ELISA displacement assay. In this experiment, a multi-well plate was coated with the PSMGFR peptide. Recombinant NME7_{AB} was allowed to bind to the surface-immobilized PSMGFR peptide. Various antibodies were added, followed by a wash step. The amount of NME7_{AB} that remained attached to the PSMGFR coated plate, after antibody competition, was measured by detecting a tag on the NME7_{AB}. As a control, anti-NME7_{AB} antibodies were also tested for their ability to displace NME7_{AB} from the PSMGFR.

[0310] FIG. 70B shows the amino acid sequence of the PSMGFR peptide that has been extended 20 amino acids at the N-terminus.

[0311] FIG. 71A-71H shows photographs of Western blots in which antibodies are tested for their ability to bind to a linear epitope in full-length MUC1 or MUC1*. FIG. 71A-71D shows testing of antibodies for ability to bind to a MUC1 negative cell line, HCT-116, or engineered cell lines HCT-MUC1-18, which is a cleavage resistant clone that expresses full-length MUC1, or HCT-MUC1*, which is engineered to express only the PSMGFR sequence in its extra cellular domain. FIG. 71E-71H shows testing of antibodies for ability to bind to breast cancer cell lines T47D or 1500 aka ZR-75-1. FIG. 71A and FIG. 71E show MNC2, a monoclonal antibody raised against PSMGFR peptide that binds to N−10 but not C−10 variants of the PSMGFR peptide. FIG. 71B and FIG. 71F show MNE6, a monoclonal antibody raised against PSMGFR peptide that binds to N−10 but not C−10 variants of the PSMGFR peptide. FIG. 71C and FIG. 71G show SDIX, a polyclonal antibody raised against PSMGFR peptide and which binds to the PSMGFR peptide.

[0312] FIG. 71D and FIG. 71H show VU4H5, a commercially available monoclonal antibody that binds to the tandem repeats of full-length MUC1. As can be seen, neither MNC2 nor MNE6 bind linear epitopes of MUC1 species.

[0313] FIG. 72A-72P shows photographs of Western blots in which antibodies are tested for their ability to bind to a linear epitope in full-length MUC1 or MUC1*. All these antibodies were raised against the PSMGFR peptide and bind to the PSMGFR peptide. FIG. 72A-72H shows testing of antibodies for ability to bind to a MUC1 negative cell line, HCT-116, or engineered cell lines HCT-MUC1-18, which is a cleavage resistant clone that expresses full-length MUC1, or HCT-MUC1*, which is engineered to express only the PSMGFR sequence in its extra cellular domain. FIG. 72I-72P shows testing of antibodies for ability to bind to breast cancer cell lines T47D or 1500 aka ZR-75-1. FIG. 72A and FIG. 72I show 20A10. FIG. 72B and FIG. 72J show 25E6. FIG. 72C and FIG. 72K show 18B4. FIG. 72D and FIG. 72L show 18G12. FIG. 72E and FIG. 72M show 28F9. FIG. 72F and FIG. 72N show 3C2B1. FIG. 72G and FIG. 72O show 5C6F3. FIG. 72H and FIG. 72P show 5C6F3 wherein the blot has been exposed for a longer time period to render more visible the MUC1* specific bands. As can be seen, antibodies 25E6, 18B4 and to a degree 5C6F3 recognize linear epitopes but 20A10, 3C2B1, 18G12 and 28F9 do not.

[0314] FIG. 73A-73J shows photographs of Western blots in which antibodies are tested for their ability to bind to a linear epitope in full-length MUC1 or MUC1*. All these antibodies were raised against the N+20/C−27 variant of the PSMGFR peptide and bind to the N+20/C−27 peptide. FIG. 73A-73E shows testing of antibodies for ability to bind to a MUC1 negative cell line, HCT-116, or engineered cell lines HCT-MUC1-18, which is a cleavage resistant clone that expresses full-length MUC1, or HCT-MUC1*, which is engineered to express only the PSMGFR sequence in its extra cellular domain. FIG. 73F-73J shows testing of antibodies for ability to bind to breast cancer cell lines T47D or 1500 aka ZR-75-1. FIG. 73A and FIG. 73F show 1E4. FIG. 73B and FIG. 73G show 45C11. FIG. 73C and FIG. 73H show 31A1. FIG. 73D and FIG. 73I show 32C1. FIG. 73E and FIG. 73J show 29H1. As can be seen, antibodies 31A1 and 32C1 recognize linear epitopes.

[0315] FIG. 74A-74H shows photographs of Western blots in which antibodies are tested for their ability to bind to a linear epitope in full-length MUC1 or MUC1*. All these antibodies were raised against the N+9/C−9 variant of the PSMGFR peptide and bind to the N+9/C−9 peptide. FIG. 74A-74D shows testing of antibodies for ability to bind to a MUC1 negative cell line, HCT-116, or engineered cell lines HCT-MUC1-18, which is a cleavage resistant clone that expresses full-length MUC1, or HCT-MUC1*, which is engineered to express only the PSMGFR sequence in its extra cellular domain. FIG. 74E-74H shows testing of antibodies for ability to bind to breast cancer cell lines T47D or 1500 aka ZR-75-1. FIG. 74A and FIG. 74E show 8A9. FIG. 74B and FIG. 74F show 17H6. FIG. 74C and FIG. 74G show 3C5. FIG. 74D and FIG. 74H show 39H5.

[0316] FIG. 75A-75P show graphs of FACS analysis. HCT-MUC1-18 cells, which express full-length MUC1, were incubated with a catalytically active MMP9 or MMP2 for 24 hours, incubated with an antibody of the invention and then analyzed by FACS to see if the antibody bound to the MMP9 or the MMP2 cleaved form of MUC1. Note that the first bar of each graph shows that none of the antibodies binds to full-length MUC1 in the absence of cleavage. Each bar graph is labeled with both the name of the antibody used in that assay and its cognate epitope. The order of the graphs from right to left corresponds to the distance the from the cell surface of the antibody's cognate epitope. FIG. 75A shows antibody 1E4. FIG. 75B shows antibody 28F9. FIG. 75C shows antibody 18G12. FIG. 75D shows antibody 25E6. FIG. 75E shows antibody 20A10. FIG. 75F shows antibody 3C5. FIG. 75G shows antibody 29H1. FIG. 75H shows antibody 32C1. FIG. 75I shows antibody 31A1. FIG. 75J shows antibody 18B4. FIG. 75K shows antibody 45C11. FIG. 75L shows antibody 8A9. FIG. 75M shows antibody 17H6. FIG. 75N shows antibody 39H5. FIG. 75O shows antibody 3C2B1. FIG. 75P shows antibody 5C6F3.

[0317] FIG. 76A-76J show graphs of FACS analyses of reference antibodies MNC2, “C2”, and VU4H5 binding to either the MUC1-negative cell line HCT-116, HCTs transfected with MUC1*, “HCT-MUC1*”, a cleavage resistant single cell clone of HCTs transfected with MUC1 full-length, “HCT-MUC1-18”, and MNC2 binding to breast cancer cells line T47D or breast cancer cell line 1500 also known as ZR-75-1. MNC2 binds to an ectopic binding site on the extra cellular domain of MUC1*, within the membrane proximal portion of the PSMGFR sequence. The MNC2 binding site is only available after cleavage and release of the bulk of the extra cellular domain comprising the tandem repeat domain. VU4H5 binds to hundreds of repeating epitopes in the tandem repeat domain. FIG. 76A-76E show percent binding and FIG. 76F-76J show Mean Fluorescent Intensity or MFI.

[0318] FIG. 77A-77N show graphs of FACS analyses of reference antibody MNC2, “C2”, binding to a panel of cancer cell lines that are MUC1* positive, with the exception of MDA-MB-231, which expresses MUC1 and MUC1* at a level that is so low that it is often used as a negative control. MNC2 binds to an ectopic binding site on the extra cellular domain of MUC1*, within the membrane proximal portion of the PSMGFR sequence. The MNC2 binding site is only available after cleavage and release of the bulk of the extra cellular domain comprising the tandem repeat domain. FIG. 77A-77G show percent binding and FIG. 77H-77N show Mean Fluorescent Intensity or MFI. FIGS. 77A and 77H show the antibodies binding to lung cancer cell line NCI-H292. FIGS. 77B and 77I show the antibodies binding to lung cancer cell line NCI-H1975. FIGS. 77C and 77J show the antibodies binding to ovarian cancer cell line SKOV-3. FIGS. 77D and 77K show the antibodies binding to pancreatic cancer cell line HPAF-II. FIGS. 77E and 77L show the antibodies binding to pancreatic cancer cell line Capan-1. FIGS. 77F and 77M show the antibodies binding to prostate cancer cell line DU145. FIGS. 77G and 77N show the antibodies binding to breast cancer cell line MDA-MB-231, which is nearly MUC1 and MUC1* negative.

[0319] FIG. 78A-78C shows a color coded schematic of the basic PSMGFR sequence that has been extended or deleted at both the N- and C-termini. Antibodies of the invention were tested against this subset of peptides to further refine the epitopes to which each antibody binds or the critical amino acids within the epitope to which each antibody binds. FIG. 78A is an aligned schematic of the various subsets of peptides. FIG. 78B lists the antibodies that bind to each of the color coded sequences. FIG. 78C lists the cancer cell lines that each antibody recognizes.

[0320] FIG. 79A-79I shows color coded graphs that resulted from FACS analyses of each antibody binding to T47D breast cancer cells and their respective cognate sequences within the N-terminally extended PSMGFR sequence. FIG. 79A-79D are FACS graphs showing the percent cells that were recognized by each antibody. FIG. 79E-79H are FACS graphs showing the Mean Fluorescence Intensity, MFI, of each antibody. FIG. 79A and FIG. 79E show the FACS graph of antibodies that were generated by immunizing with the PSMGFR peptide. FIG. 79B and FIG. 79F show the FACS graph of antibodies that were generated by immunizing with the N+20/C−27 peptide. FIG. 79C and FIG. 79G show the FACS graph of antibodies that were generated by immunizing with the N+9/C−9 peptide. FIG. 79D and FIG. 79H also show the FACS graph of antibodies that were generated by immunizing with the PSMGFR peptide. FIG. 79I shows the PSMGFR sequence that is extended at the N-terminus by 20 amino acids.

[0321] FIG. 80A-80I shows color coded graphs that resulted from FACS analyses of each antibody binding to 1500, also known as ZR-75-1, breast cancer cells and their respective cognate sequences within the N-terminally extended PSMGFR sequence. FIG. 80A-80C are FACS graphs showing the percent cells that were recognized by each antibody. FIG. 80D-80F are FACS graphs showing the Mean Fluorescence Intensity, MFI, of each antibody. FIG. 80A, FIG. 80E FIG. 80D and FIG. 80H show the FACS graph of antibodies that were generated by immunizing with the PSMGFR peptide. FIG. 80B and FIG. 80F show the FACS graph of antibodies that were generated by immunizing with the N+20/C−27 peptide. FIG. 80C and FIG. 80G show the FACS graph of antibodies that were generated by immunizing with the N+9/C−9 peptide. FIG. 80I shows the PSMGFR sequence that is extended at the N-terminus by 20 amino acids.

[0322] FIG. 81A-81G shows color coded graphs that resulted from FACS analyses of each antibody binding to NCI-H292 lung cancer cells and their respective cognate sequences within the N-terminally extended PSMGFR sequence. FIG. 81A-81C are FACS graphs showing the percent cells that were recognized by each antibody. FIG. 81D-81F are FACS graphs showing the Mean Fluorescence Intensity, MFI, of each antibody. FIG. 81A and FIG. 81D show the FACS graph of antibodies that were generated by immunizing with the PSMGFR peptide. FIG. 81B and FIG. 81E show the FACS graph of antibodies that were generated by immunizing with the N+20/C−27 peptide. FIG. 81C and FIG. 81F show the FACS graph of antibodies that were generated by immunizing with the N+9/C−9 peptide. FIG. 81G shows the PSMGFR sequence that is extended at the N-terminus by 20 amino acids.

[0323] FIG. 82A-82G shows color coded graphs that resulted from FACS analyses of each antibody binding to NCI-H1975 lung cancer cells and their respective cognate sequences within the N-terminally extended PSMGFR sequence. FIG. 82A-82C are FACS graphs showing the percent cells that were recognized by each antibody. FIG. 82D-82F are FACS graphs showing the Mean Fluorescence Intensity, MFI, of each antibody. FIG. 82A and FIG. 82D show the FACS graph of antibodies that were generated by immunizing with the PSMGFR peptide. FIG. 82B and FIG. 82E show the FACS graph of antibodies that were generated by immunizing with the N+20/C-27 peptide. FIG. 82C and FIG. 82F show the FACS graph of antibodies that were generated by immunizing with the N+9/C−9 peptide. FIG. 82G shows the PSMGFR sequence that is extended at the N-terminus by 20 amino acids.

[0324] FIG. 83A-83G shows color coded graphs that resulted from FACS analyses of each antibody binding to SKOV-3 ovarian cancer cells and their respective cognate sequences within the N-terminally extended PSMGFR sequence. FIG. 83A-83C are FACS graphs showing the percent cells that were recognized by each antibody. FIG. 83D-83F are FACS graphs showing the Mean Fluorescence Intensity, MFI, of each antibody. FIG. 83A and FIG. 83D show the FACS graph of antibodies that were generated by immunizing with the PSMGFR peptide. FIG. 83B and FIG. 83E show the FACS graph of antibodies that were generated by immunizing with the N+20/C-27 peptide. FIG. 83C and FIG. 83F show the FACS graph of antibodies that were generated by immunizing with the N+9/C−9 peptide. FIG. 83G shows the PSMGFR sequence that is extended at the N-terminus by 20 amino acids.

[0325] FIG. 84A-84H shows color coded graphs that resulted from FACS analyses of each antibody binding to DU145 prostate cancer cells and their respective cognate sequences within the N-terminally extended PSMGFR sequence. FIGS. 84A-84D are FACS graphs showing the percent cells that were recognized by each antibody. FIGS. 84E-84H are FACS graphs showing the Mean Fluorescence Intensity, MFI, of each antibody. FIG. 84A and FIG. 84E show the FACS graphs of antibodies that were generated by immunizing with the PSMGFR peptide. FIG. 84B and FIG. 84F show the FACS graphs of antibodies that were generated by immunizing with the N+20/C−27 peptide. FIG. 84C and FIG. 84G show the FACS graphs of antibodies that were generated by immunizing with the N+9/C−9 peptide. FIG. 84D and FIG. 84G show the FACS graph of antibodies that were generated by immunizing with the PSMGFR peptide.

[0326] FIG. 841 shows the sequence of the PSMGFR peptide that has been extended 20 amino acids at the N-terminus

[0327] FIG. 85A-85G shows color coded graphs that resulted from FACS analyses of each antibody binding to HPAF-II pancreatic cancer cells and their respective cognate sequences within the N-terminally extended PSMGFR sequence. FIG. 85A-85C are FACS graphs showing the percent cells that were recognized by each antibody. FIG. 85D-85F are FACS graphs showing the Mean Fluorescence Intensity, MFI, of each antibody. FIG. 85A and FIG. 85D show the FACS graph of antibodies that were generated by immunizing with the PSMGFR peptide. FIG. 85B and FIG. 85E show the FACS graph of antibodies that were generated by immunizing with the N+20/C-27 peptide. FIG. 85C and FIG. 85F show the FACS graph of antibodies that were generated by immunizing with the N+9/C−9 peptide. FIG. 85G shows the PSMGFR sequence that is extended at the N-terminus by 20 amino acids.

[0328] FIG. 86A-86G shows color coded graphs that resulted from FACS analyses of each antibody binding to Capan-1 pancreatic cancer cells and their respective cognate sequences within the N-terminally extended PSMGFR sequence. FIG. 86A-86C are FACS graphs showing the percent cells that were recognized by each antibody. FIG. 86D-86F are FACS graphs showing the Mean Fluorescence Intensity, MFI, of each antibody. FIG. 86A and FIG. 86D show the FACS graph of antibodies that were generated by immunizing with the PSMGFR peptide. FIG. 86B and FIG. 86E show the FACS graph of antibodies that were generated by immunizing with the N+20/C-27 peptide. FIG. 86C and FIG. 86F show the FACS graph of antibodies that were generated by immunizing with the N+9/C−9 peptide. FIG. 86G shows the PSMGFR sequence that is extended at the N-terminus by 20 amino acids.

[0329] FIG. 87A-87G shows color coded graphs that resulted from FACS analyses of each antibody binding to MDA-MB-231 breast cancer cells, which are nearly MUC1 negative, and their respective cognate sequences within the N-terminally extended PSMGFR sequence. FIG. 87A-87C are FACS graphs showing the percent cells that were recognized by each antibody. FIG. 87D-87F are FACS graphs showing the Mean Fluorescence Intensity, MFI, of each antibody. FIG. 87A and FIG. 87D show the FACS graph of antibodies that were generated by immunizing with the PSMGFR peptide. FIG. 87B and FIG. 87E show the FACS graph of antibodies that were generated by immunizing with the N+20/C−27 peptide. FIG. 87C and FIG. 87F show the FACS graph of antibodies that were generated by immunizing with the N+9/C−9 peptide. FIG. 87G shows the PSMGFR sequence that is extended at the N-terminus by 20 amino acids.

[0330] FIG. 88A-88L show photographs of normal liver tissue specimens, each from the same donor but stained with a different antibody of the invention. FIG. 88A-88F show the entire tissue core. FIG. 88G-88L show the 40× magnification of a particular area of the tissue. The tissues are ordered from right to left with antibodies that bind to the most membrane proximal, that is to say most C-terminal portion of the PSMGFR peptide, on the right and antibodies that bind to the most N-terminal portions of the MUC1 extra cellular domain, even beyond the PSMGFR region, on the left. As can be seen in the figure, the most cancer-specific antibodies are those that bind to the more membrane proximal portions of the PSMGFR sequence and antibodies that bind to the most distal, N-terminal portions lose cancer specificity, with those antibodies that bind to epitopes outside of the PSMGFR having lost all cancer specificity.

[0331] FIG. 89A-89H show photographs of normal heart tissue specimens, stained with different antibodies of the invention. FIG. 89A-89D show the entire tissue core. FIG. 89E-89HL show the 40× magnification of a particular area of the tissue. FIG. 89A and FIG. 89E show staining with MNC2-scFv. FIG. 89B and FIG. 89F show staining with MNE6. FIG. 89C and FIG. 89G show staining with 20A10. FIG. 89D and FIG. 89H show staining with 3C2B1. These antibodies bind to an epitope that comprises all or part of the sequence FPFS or PFPFSAQSGA. All these antibodies are all able to bind to the PSMGFR peptide, bind to the N−10 peptide but do not bind to the C−10 peptide. In addition, these antibodies disrupt the binding of NME7_{AB} to the MUC1* extra cellular domain as exemplified by the PSMGFR peptide. Further, these antibodies recognize a MUC1 cleavage product when the cleavage enzyme is MMP9. As can be seen in the figure, these antibodies show no binding to normal heart tissue.

[0332] FIG. 90A-90D show photographs of normal heart tissue specimens, stained with different antibodies of the invention. FIG. 90A-90B show the entire tissue core. FIG. 90C-90D show the 40× magnification of a particular area of the tissue. FIG. 90A and FIG. 90C show staining with MNC3. FIG. 90B and FIG. 90D show staining with 25E6. These antibodies bind to an epitope that comprises all or part of the sequence ASRYNLT. These antibodies are all able to bind to the PSMGFR peptide, bind to the N−10 peptide but also bind to the C−10 peptide.

[0333] FIG. 91A-91B show photographs of normal heart tissue specimens, stained with an antibody of the invention 1E4. FIG. 91A show the entire tissue core. FIG. 91B show the 40× magnification of a particular area of the tissue. Antibody 1E4 binds to an epitope that comprises all or part of the sequence QFNQYKTEA. Antibody 1E4 can bind to the N−10 peptide but also binds to the C−10 peptide. As can be seen in the figure, 1E4 binds to normal heart tissue.

[0334] FIG. 92A-92H show photographs of normal heart tissue specimens, stained with different antibodies of the invention. FIG. 92A-92D show the entire tissue core. FIG. 92E-92HL show the 40× magnification of a particular area of the tissue. FIG. 92A and FIG. 92E show staining with 18B4. FIG. 92B and FIG. 92F show staining with 31A1. FIG. 92C and FIG. 92G show staining with 32C1. FIG. 92D and FIG. 92H show staining with 29H1. These antibodies bind to an epitope that comprises all or part of the sequence GTINVHDVET, which is the most N-terminal part of the PSMGFR peptide. None of these antibodies are able to bind to the N−10 peptide. As can be seen in the figure, all of these antibodies except 18B4 show bind to normal heart tissue.

[0335] FIG. 93A-93D show photographs of normal heart tissue specimens, stained with antibodies of the invention. FIG. 93A-93B show the entire tissue core. FIG. 93C-93D show the 40× magnification of a particular area of the tissue. FIG. 93A and FIG. 93C show staining with antibody 8A9. FIG. 93B and FIG. 93D show staining with antibody 17H6. Both antibodies bind to an epitope that that is outside of the PSMGFR region and comprises all or part of the sequence VQLTLAFRE. As can be seen in the figure, both antibodies show strong binding to normal heart tissue.

[0336] FIG. 94A-94B show photographs of normal heart tissue specimens, stained with an antibody of the invention 45C11. FIG. 94A show the entire tissue core. FIG. 94B show the 40× magnification of a particular area of the tissue. Antibody 45C11 binds to an epitope that is outside of the PSMGFR region and comprises all or part of the sequence SNIKFRPGSVV. Antibody 45C11 cannot bind to the N−10 peptide. As can be seen in the figure, 45C11 binds strongly to normal heart tissue.

[0337] FIG. 95A-95H show photographs of normal liver tissue specimens, stained with different antibodies of the invention. FIG. 95A-95D show the entire tissue core. FIG. 95E-95HL show the 40× magnification of a particular area of the tissue. FIG. 95A and FIG. 95E show staining with MNC2-scFv. FIG. 95B and FIG. 95F show staining with MNE6. FIG. 95C and FIG. 95G show staining with 20A10. FIG. 95D and FIG. 95H show staining with 3C2B1. These antibodies bind to an epitope that comprises all or part of the sequence FPFS or PFPFSAQSGA. All these antibodies are all able to bind to the PSMGFR peptide, bind to the N−10 peptide but do not bind to the C−10 peptide. In addition, these antibodies disrupt the binding of NME7_{AB} to the MUC1* extra cellular domain as exemplified by the PSMGFR peptide. Further, these antibodies recognize a MUC1 cleavage product when the cleavage enzyme is MMP9. As can be seen in the figure, these antibodies show no binding to normal liver tissue.

[0338] FIG. 96A-96D show photographs of normal liver tissue specimens, stained with different antibodies of the invention. FIG. 96A-96B show the entire tissue core. FIG. 96C-96D show the 40× magnification of a particular area of the tissue. FIG. 96A and FIG. 96C show staining with MNC3. FIG. 96B and FIG. 96D show staining with 25E6. These antibodies bind to an epitope that comprises all or part of the sequence ASRYNLT. These antibodies are all able to bind to the PSMGFR peptide, bind to the N−10 peptide but also bind to the C−10 peptide.

[0339] FIG. 97A-97B show photographs of normal liver tissue specimens, stained with an antibody of the invention 1E4. FIG. 97A show the entire tissue core. FIG. 97B show the 40× magnification of a particular area of the tissue. Antibody 1E4 binds to an epitope that comprises all or part of the sequence QFNQYKTEA. Antibody 1E4 can bind to the N−10 peptide but also binds to the C−10 peptide. As can be seen in the figure, 1E4 binds to normal liver tissue.

[0340] FIG. 98A-98H show photographs of normal liver tissue specimens, stained with different antibodies of the invention. FIG. 98A-98D show the entire tissue core. FIG. 98E-98H show the 40× magnification of a particular area of the tissue. FIG. 98A and FIG. 98E show staining with 18B4. FIG. 98B and FIG. 98F show staining with 31A1. FIG. 98C and FIG. 98G show staining with 32C1. FIG. 98D and FIG. 98H show staining with 29H1. These antibodies bind to an epitope that comprises all or part of the sequence GTINVHDVET, which is the most N-terminal part of the PSMGFR peptide. None of these antibodies are able to bind to the N−10 peptide. As can be seen in the figure, 32C1 shows some binding to normal liver and 29H1 shows extremely strong binding to normal liver tissue.

[0341] FIG. 99A-99D show photographs of normal liver tissue specimens, stained with antibodies of the invention. FIG. 99A-99B show the entire tissue core. FIG. 99C-99D show the 40× magnification of a particular area of the tissue. FIG. 99A and FIG. 99C show staining with antibody 8A9. FIG. 99B and FIG. 99D show staining with antibody 17H6. Both antibodies bind to an epitope that that is outside of the PSMGFR region and comprises all or part of the sequence VQLTLAFRE. As can be seen in the figure, 8A9 shows strong binding to normal liver tissue. 17H6 is a weak antibody and it is possible that it was not used at a high enough concentration in this study.

[0342] FIG. 100A-100B show photographs of normal liver tissue specimens, stained with an antibody of the invention 45C11. FIG. 100A show the entire tissue core. FIG. 100B show the 40× magnification of a particular area of the tissue. Antibody 45C11 binds to an epitope that is outside of the PSMGFR region and comprises all or part of the sequence SNIKFRPGSVV. Antibody 45C11 cannot bind to the N−10 peptide. As can be seen in the figure, 45C11 binds strongly to normal liver tissue.

[0343] FIG. 101A-101H show photographs of normal lung tissue specimens, stained with different antibodies of the invention. FIG. 101A-101D show the entire tissue core. FIG. 101E-101H show the 40× magnification of a particular area of the tissue. FIG. 101A and FIG. 101E show staining with MNC2-scFv. FIG. 101B and FIG. 101F show staining with MNE6. FIG. 101C and FIG. 101G show staining with 20A10. FIG. 101D and FIG. 101H show staining with 3C2B1. These antibodies bind to an epitope that comprises all or part of the sequence FPFS or PFPFSAQSGA. All these antibodies are all able to bind to the PSMGFR peptide, bind to the N−10 peptide but do not bind to the C−10 peptide. In addition, these antibodies disrupt the binding of NME7_{AB} to the MUC1* extra cellular domain as exemplified by the PSMGFR peptide. Further, these antibodies recognize a MUC1 cleavage product when the cleavage enzyme is MMP9. As can be seen in the figure, these antibodies show no binding to normal lung tissue.

[0344] FIG. 102A-102D show photographs of normal lung tissue specimens, stained with different antibodies of the invention. FIG. 102A-102B show the entire tissue core. FIG. 102C-102D show the 40× magnification of a particular area of the tissue. FIG. 102A and FIG. 102C show staining with MNC3. FIG. 102B and FIG. 102D show staining with 25E6. These antibodies bind to an epitope that comprises all or part of the sequence ASRYNLT. These antibodies are all able to bind to the PSMGFR peptide, bind to the N−10 peptide but also bind to the C−10 peptide.

[0345] FIG. 103A-103B show photographs of normal lung tissue specimens, stained with an antibody of the invention 1E4. FIG. 103A show the entire tissue core. FIG. 103B show the 40× magnification of a particular area of the tissue. Antibody 1E4 binds to an epitope that comprises all or part of the sequence QFNQYKTEA. Antibody 1E4 can bind to the N−10 peptide but also binds to the C−10 peptide.

[0346] FIG. 104A-104H show photographs of normal lung tissue specimens, stained with different antibodies of the invention. FIG. 104A-104D show the entire tissue core. FIG. 104E-104H show the 40× magnification of a particular area of the tissue. FIG. 104A and FIG. 104E show staining with 18B4. FIG. 104B and FIG. 104F show staining with 31A1. FIG. 104C and FIG. 104G show staining with 32C1. FIG. 104D and FIG. 104H show staining with 29H1. These antibodies bind to an epitope that comprises all or part of the sequence GTINVHDVET, which is the most N-terminal part of the PSMGFR peptide. None of these antibodies are able to bind to the N−10 peptide. As can be seen in the figure, all these antibodies show strong binding to normal lung tissue.

[0347] FIG. 105A-105D show photographs of normal lung tissue specimens, stained with antibodies of the invention. FIG. 105A-105B show the entire tissue core. FIG. 105C-105D show the 40× magnification of a particular area of the tissue. FIG. 105A and FIG. 105C show staining with antibody 8A9. FIG. 105B and FIG. 105D show staining with antibody 17H6. Both antibodies bind to an epitope that that is outside of the PSMGFR region and comprises all or part of the sequence VQLTLAFRE. As can be seen in the figure, 8A9 shows strong binding to normal lung tissue. 17H6 is a weak antibody and it is possible that it was not used at a high enough concentration in this study.

[0348] FIG. 106A-106B show photographs of normal lung tissue specimens, stained with an antibody of the invention 45C11. FIG. 106A show the entire tissue core. FIG. 106B show the 40× magnification of a particular area of the tissue. Antibody 45C11 binds to an epitope that is outside of the PSMGFR region and comprises all or part of the sequence SNIKFRPGSVV. Antibody 45C11 cannot bind to the N−10 peptide. As can be seen in the figure, 45C11 binds to normal lung tissue.

[0349] FIG. 107A-107H show photographs of normal bone marrow tissue specimens, stained with different antibodies of the invention. FIG. 107A-107D show the entire tissue core. FIG. 107E-107H show the 40× magnification of a particular area of the tissue. FIG. 107A and FIG. 107E show staining with MNC2-scFv. FIG. 107B and FIG. 107F show staining with MNE6. FIG. 107C and FIG. 107G show staining with 20A10. FIG. 107D and FIG. 107H show staining with 3C2B1. These antibodies bind to an epitope that comprises all or part of the sequence FPFS or PFPFSAQSGA. All these antibodies are all able to bind to the PSMGFR peptide, bind to the N−10 peptide but do not bind to the C−10 peptide. In addition, these antibodies disrupt the binding of NME7_{AB} to the MUC1* extra cellular domain as exemplified by the PSMGFR peptide. Further, these antibodies recognize a MUC1 cleavage product when the cleavage enzyme is MMP9. As can be seen in the figure, these antibodies show no binding to normal bone marrow tissue.

[0350] FIG. 108A-108D show photographs of normal bone marrow tissue specimens, stained with different antibodies of the invention. FIG. 108A-108B show the entire tissue core. FIG. 108C-108D show the 40× magnification of a particular area of the tissue. FIG. 108A and FIG. 108C show staining with MNC3. FIG. 108B and FIG. 108D show staining with 25E6. These antibodies bind to an epitope that comprises all or part of the sequence ASRYNLT. These antibodies are all able to bind to the PSMGFR peptide, bind to the N−10 peptide but also bind to the C−10 peptide.

[0351] FIG. 109A-109B show photographs of normal bone marrow tissue specimens, stained with an antibody of the invention 1E4. FIG. 109A show the entire tissue core. FIG. 109B show the 40× magnification of a particular area of the tissue. Antibody 1E4 binds to an epitope that comprises all or part of the sequence QFNQYKTEA. Antibody 1E4 can bind to the N−10 peptide but also binds to the C−10 peptide. 1E4 binds to normal bone marrow.

[0352] FIG. 110A-110H show photographs of normal bone marrow tissue specimens, stained with different antibodies of the invention. FIG. 110A-110D show the entire tissue core. FIG. 110E-110H show the 40× magnification of a particular area of the tissue. FIG. 110A and FIG. 110E show staining with 18B4. FIG. 110B and FIG. 110F show staining with 31A1. FIG. 110C and FIG. 110G show staining with 32C1. FIG. 110D and FIG. 110H show staining with 29H1. These antibodies bind to an epitope that comprises all or part of the sequence GTINVHDVET, which is the most N-terminal part of the PSMGFR peptide. None of these antibodies are able to bind to the N−10 peptide. As can be seen in the figure, all these antibodies show strong binding to normal bone marrow tissue.

[0353] FIG. 111A-111D show photographs of normal bone marrow tissue specimens, stained with antibodies of the invention. FIG. 111A-111B show the entire tissue core. FIG. 111C-111D show the 40× magnification of a particular area of the tissue. FIG. 111A and FIG. 111C show staining with antibody 8A9. FIG. 111B and FIG. 111D show staining with antibody 17H6. Both antibodies bind to an epitope that that is outside of the PSMGFR region and comprises all or part of the sequence VQLTLAFRE. As can be seen in the figure, 8A9 shows strong binding to normal bone marrow tissue. 17H6 is a weak antibody and it is possible that it was not used at a high enough concentration in this study.

[0354] FIG. 112A-112B show photographs of normal bone marrow tissue specimens, stained with an antibody of the invention 45C11. FIG. 112A show the entire tissue core. FIG. 112B show the 40× magnification of a particular area of the tissue. Antibody 45C11 binds to an epitope that is outside of the PSMGFR region and comprises all or part of the sequence SNIKFRPGSVV. Antibody 45C11 cannot bind to the N−10 peptide. As can be seen in the figure, 45C11 binds to normal bone marrow tissue.

[0355] FIG. 113A-113C shows photographs, array map and description of FDA normal tissue array 1021 stained with the anti-PSMGFR antibody 20A10 at 0.25 ug/mL. FIG. 113A shows photographs of the tissue micro array. FIG. 113B shows map of the array with abbreviated tissue descriptors. FIG. 113C detailed description of the tissue micro array with non-identifying donor data.

[0356] FIG. 114A-114X shows photographs of specific tissues from FDA normal tissue array 1021 stained with the anti-PSMGFR antibody 20A10 at 0.25 ug/mL, magnified to 6× and 20×. FIG. 114A and FIG. 114E are adrenal gland. FIG. 114B and FIG. 114F are breast. FIG. 114C and FIG. 114G are fallopian tube. FIG. 114D and FIG. 114H are kidney. FIG. 114I and FIG. 114M are heart muscle. FIG. 114J and FIG. 114N are liver. FIG. 114K and FIG. 114O are lung. FIG. 114L and FIG. 114P are ureter. FIG. 114Q and FIG. 114U are eye. FIG. 114R and FIG. 114V are cerebral cortex. FIG. 114S and FIG. 114W are bone marrow. FIG. 114T and FIG. 114X are skeletal muscle.

[0357] FIG. 115A-115C shows photographs, array map and description of breast cancer tissue array 1141 stained with the anti-PSMGFR antibody 20A10 at 0.25 ug/mL. FIG. 115A shows photographs of the tissue micro array. FIG. 115B shows map of the array with abbreviated tissue descriptors. FIG. 115C detailed description of the tissue micro array with non-identifying donor data.

[0358] FIG. 116A-116F shows photographs of specific tissues from breast cancer tissue array 1141 stained with the anti-PSMGFR antibody 20A10 at 0.25 ug/mL, magnified to 6× and 20×. FIG. 116A and FIG. 116D are photographs of a Grade 2 invasive ductal carcinoma. FIG. 116B and FIG. 116E are photographs of a Grade 2 invasive ductal carcinoma. FIG. 116C and FIG. 116F are photographs of a Grade 2 invasive ductal carcinoma.

[0359] FIG. 117A-117C shows photographs, array map and description of pancreatic cancer tissue array PA805c stained with the anti-PSMGFR antibody 20A10 at 0.25 ug/mL. FIG. 117A shows photographs of the tissue micro array. FIG. 117B shows map of the array with abbreviated tissue descriptors. FIG. 117C detailed description of the tissue micro array with non-identifying donor data.

[0360] FIG. 118A-118F shows photographs of specific tissues from pancreatic cancer tissue array PA805c stained with the anti-PSMGFR antibody 20A10 at 0.25 ug/mL, magnified to 6× and 20×. FIG. 118A and FIG. 118D are photographs of a Grade 2 papillary adenocarcinoma. FIG. 118B and FIG. 118E are photographs of a Grade 2-3 ductal carcinoma. FIG. 118C and FIG. 118F are photographs of a Grade 3 invasive adenocarcinoma.

[0361] FIG. 119A-119C shows photographs, array map and description of esophageal cancer tissue array BC001113 stained with the anti-PSMGFR antibody 20A10 at 0.25 ug/mL. FIG. 119A shows photographs of the tissue micro array. FIG. 119B shows map of the array with abbreviated tissue descriptors. FIG. 119C detailed description of the tissue micro array with non-identifying donor data.

[0362] FIG. 120A-120F shows photographs of specific tissues from esophageal cancer tissue array BC001113 stained with the anti-PSMGFR antibody 20A10 at 0.25 ug/mL, magnified to 6× and 20×. FIG. 120A and FIG. 120D are photographs of the specimen at position A1. FIG. 120B and FIG. 120E are photographs of the specimen at position A7. FIG. 120C and FIG. 120F are photographs of the specimen at position A8.

[0363] FIG. 121A-121C shows photographs, array map and description of FDA normal tissue array 1021 stained with the anti-PSMGFR antibody 3C2B1 at 20 ug/mL. FIG. 121A shows photographs of the tissue micro array. FIG. 121B shows map of the array with abbreviated tissue descriptors. FIG. 121C detailed description of the tissue micro array with non-identifying donor data.

[0364] FIG. 122A-122X shows photographs of specific tissues from FDA normal tissue array 1021 stained with the anti-PSMGFR antibody 3C2B1 at 20 ug/mL, magnified to 6× and 20×. FIG. 122A and FIG. 122E are adrenal gland. FIG. 122B and FIG. 122F are breast. FIG. 122C and FIG. 122G are fallopian tube. FIG. 122D and FIG. 122H are kidney. FIG. 122I and FIG. 122M are heart muscle. FIG. 122J and FIG. 122N are liver. FIG. 122K and FIG. 122O are lung. FIG. 122L and FIG. 122P are ureter. FIG. 122Q and FIG. 122U are eye. FIG. 122R and FIG. 122V are cerebral cortex.

[0365] FIG. 122S and FIG. 122W are bone marrow. FIG. 122T and FIG. 122X are skeletal muscle.

[0366] FIG. 123A-123C shows photographs, array map and description of pancreatic cancer tissue array PA1003 stained with the anti-PSMGFR antibody 3C2B1 at 20 ug/mL. FIG. 123A shows photographs of the tissue micro array. FIG. 123B shows map of the array with abbreviated tissue descriptors. FIG. 123C detailed description of the tissue micro array with non-identifying donor data.

[0367] FIG. 124A-124F shows photographs of specific tissues from pancreatic cancer tissue array PA1003 stained with the anti-PSMGFR antibody 3C2B1 at 20 ug/mL, magnified to 6× and 20×. FIG. 124A and FIG. 124D are photographs of a Grade 2 adenocarcinoma. FIG. 124B and FIG. 124E are photographs of a Grade 2 adenocarcinoma. FIG. 124C and FIG. 124F are photographs of a Grade 2 adenocarcinoma.

[0368] FIG. 125A-125C shows photographs, array map and description of breast cancer tissue array 1141 stained with the anti-PSMGFR antibody 3C2B1 at 20 ug/mL. FIG. 125A shows photographs of the tissue micro array. FIG. 125B shows map of the array with abbreviated tissue descriptors. FIG. 125C detailed description of the tissue micro array with non-identifying donor data.

[0369] FIG. 126A-126F shows photographs of specific tissues from breast cancer tissue array 1141 stained with the anti-PSMGFR antibody 3C2B1 at 20 ug/mL, magnified to 6× and 20×. FIG. 126A and FIG. 126D are photographs of a Grade 2 invasive ductal carcinoma. FIG. 126B and FIG. 126E are photographs of a Grade 2 invasive ductal carcinoma. FIG. 126C and FIG. 126F are photographs of a Grade 2 invasive carcinoma.

[0370] FIG. 127A-127C shows photographs, array map and description of FDA normal tissue array 1021 stained with the anti-PSMGFR antibody 5C6F3 at 1 ug/mL. FIG. 127A shows photographs of the tissue micro array. FIG. 127B shows map of the array with abbreviated tissue descriptors. FIG. 127C detailed description of the tissue micro array with non-identifying donor data.

[0371] FIG. 128A-128X shows photographs of specific tissues from FDA normal tissue array 1021 stained with the anti-PSMGFR antibody 5C6F3 at 1 ug/mL, magnified to 6× and 20×. FIG. 128A and FIG. 128E are adrenal gland. FIG. 128B and FIG. 128F are breast. FIG. 128C and FIG. 128G are fallopian tube. FIG. 128D and FIG. 128H are kidney. FIG. 128I and FIG. 128M are heart muscle. FIG. 128J and FIG. 128N are liver. FIG. 128K and FIG. 128O are lung. FIG. 128L and FIG. 128P are ureter. FIG. 128Q and FIG. 128U are eye. FIG. 128R and FIG. 128V are cerebral cortex.

[0372] FIG. 128S and FIG. 128W are bone marrow. FIG. 128T and FIG. 128X are skeletal muscle.

[0373] FIG. 129A-129C shows photographs, array map and description of pancreatic cancer tissue array PA1003 stained with the anti-PSMGFR antibody 5C6F3 at 1-20 ug/mL. FIG. 129A shows photographs of the tissue micro array. FIG. 129B shows map of the array with abbreviated tissue descriptors. FIG. 129C detailed description of the tissue micro array with non-identifying donor data.

[0374] FIG. 130A-130F shows photographs of specific tissues from pancreatic cancer tissue array PA1003 stained with the anti-PSMGFR antibody 5C6F3 at 1 ug/mL, magnified to 6× and 20×. FIG. 130A and FIG. 130D are photographs of a Grade 2 adenocarcinoma. FIG. 130B and FIG. 130E are photographs of a Grade 2 adenocarcinoma. FIG. 130C and FIG. 130F are photographs of a Grade 2 adenocarcinoma.

[0375] FIG. 131A-131C shows photographs, array map and description of breast cancer tissue array 1141 stained with the anti-PSMGFR antibody 5C6F3 at 1 ug/mL. FIG. 131A shows photographs of the tissue micro array. FIG. 131B shows map of the array with abbreviated tissue descriptors. FIG. 131C detailed description of the tissue micro array with non-identifying donor data.

[0376] FIG. 132A-132F shows photographs of specific tissues from breast cancer tissue array 1141 stained with the anti-PSMGFR antibody 5C6F3 at 1 ug/mL, magnified to 6× and 20×. FIG. 132A and FIG. 132D are photographs of a Grade 2 invasive ductal carcinoma. FIG. 132B and FIG. 132E are photographs of a Grade 2 invasive ductal carcinoma. FIG. 132C and FIG. 132F are photographs of a Grade 2 invasive carcinoma.

[0377] FIG. 133A-133C shows photographs, array map and description of FDA normal tissue array 1021 stained with the anti-PSMGFR antibody 18B4 at 10 ug/mL. FIG. 133A shows photographs of the tissue micro array. FIG. 133B shows map of the array with abbreviated tissue descriptors. FIG. 133C detailed description of the tissue micro array with non-identifying donor data.

[0378] FIG. 134A-134X shows photographs of specific tissues from FDA normal tissue array 1021 stained with the anti-PSMGFR antibody 18B4 at 10 ug/mL, magnified to 6× and 20×. FIG. 134A and FIG. 134E are adrenal gland. FIG. 134B and FIG. 134F are breast. FIG. 134C and FIG. 134G are fallopian tube. FIG. 134D and FIG. 134H are kidney. FIG. 134I and FIG. 134M are heart muscle. FIG. 134J and FIG. 134N are liver. FIG. 134K and FIG. 134O are lung. FIG. 134L and FIG. 134P are ureter. FIG. 134Q and FIG. 134U are eye. FIG. 134R and FIG. 134V are cerebral cortex. FIG. 134S and FIG. 134W are bone marrow. FIG. 134T and FIG. 134X are skeletal muscle.

[0379] FIG. 135A-135C shows photographs, array map and description of breast cancer tissue array 1141 stained with the anti-PSMGFR antibody 18B4 at 10 ug/mL. FIG. 135A shows photographs of the tissue micro array. FIG. 135B shows map of the array with abbreviated tissue descriptors. FIG. 135C detailed description of the tissue micro array with non-identifying donor data.

[0380] FIG. 136A-136F shows photographs of specific tissues from breast cancer tissue array 1141 stained with the anti-PSMGFR antibody 18B4 at 10 ug/mL, magnified to 6× and 20×. FIG. 136A and FIG. 136D are photographs of a Grade 2 invasive ductal carcinoma. FIG. 136B and FIG. 136E are photographs of a Grade 2 invasive ductal carcinoma. FIG. 136C and FIG. 136F are photographs of a Grade 2 invasive ductal carcinoma.

[0381] FIG. 137A-137C shows photographs, array map and description of esophageal cancer tissue array BC001113 stained with the anti-PSMGFR antibody 18B4 at 10 ug/mL. FIG. 137A shows photographs of the tissue micro array. FIG. 137B shows map of the array with abbreviated tissue descriptors. FIG. 137C detailed description of the tissue micro array with non-identifying donor data.

[0382] FIG. 138A-138F shows photographs of specific tissues from esophageal cancer tissue array BC001113 stained with the anti-PSMGFR antibody 18B4 at 10 ug/mL, magnified to 6× and 20×. FIG. 138A and FIG. 138D are photographs of the specimen at position A1. FIG. 138B and FIG. 138E are photographs of the specimen at position A7. FIG. 138C and FIG. 138F are photographs of the specimen at position A8.

[0383] FIG. 139A-139C shows photographs, array map and description of FDA normal tissue array 1021 stained with the anti-PSMGFR antibody 18G12 at 10 ug/mL. FIG. 139A shows photographs of the tissue micro array. FIG. 139B shows map of the array with abbreviated tissue descriptors. FIG. 139C detailed description of the tissue micro array with non-identifying donor data.

[0384] FIG. 140A-140X shows photographs of specific tissues from FDA normal tissue array 1021 stained with the anti-PSMGFR antibody 18G12 at 10 ug/mL, magnified to 6× and 20×. FIG. 140A and FIG. 140E are adrenal gland. FIG. 140B and FIG. 140F are breast. FIG. 140C and FIG. 140G are fallopian tube. FIG. 140D and FIG. 140H are kidney. FIG. 140I and FIG. 140M are heart muscle. FIG. 140J and FIG. 140N are liver. FIG. 140K and FIG. 140O are lung. FIG. 140L and FIG. 140P are ureter. FIG. 140Q and FIG. 140U are eye. FIG. 140R and FIG. 140V are cerebral cortex. FIG. 140S and FIG. 140W are bone marrow. FIG. 140T and FIG. 140X are skeletal muscle.

[0385] FIG. 141A-141C shows photographs, array map and description of breast cancer tissue array 1141 stained with the anti-PSMGFR antibody 18G12 at 15 ug/mL. FIG. 141A shows photographs of the tissue micro array. FIG. 141B shows map of the array with abbreviated tissue descriptors. FIG. 141C detailed description of the tissue micro array with non-identifying donor data.

[0386] FIG. 142A-142F shows photographs of specific tissues from breast cancer tissue array 1141 stained with the anti-PSMGFR antibody 18G12 at 15 ug/mL, magnified to 6× and 20×. FIG. 142A and FIG. 142D are photographs of a Grade 2 invasive ductal carcinoma. FIG. 142B and FIG. 142E are photographs of a Grade 2 invasive ductal carcinoma. FIG. 142C and FIG. 142F are photographs of a Grade 2 invasive ductal carcinoma.

[0387] FIG. 143A-143C shows photographs, array map and description of pancreatic cancer tissue array PA1003 stained with the anti-PSMGFR antibody 18G12 at 15 ug/mL. FIG. 143A shows photographs of the tissue micro array. FIG. 143B shows map of the array with abbreviated tissue descriptors. FIG. 143C detailed description of the tissue micro array with non-identifying donor data.

[0388] FIG. 144A-144F shows photographs of specific tissues from pancreatic cancer tissue array PA1003 stained with the anti-PSMGFR antibody 18G12 at 15 ug/mL, magnified to 6× and 20×. FIG. 144A and FIG. 144D are photographs of a Grade 2 adenocarcinoma. FIG. 144B and FIG. 144E are photographs of a Grade 2 adenocarcinoma. FIG. 144C and FIG. 144F are photographs of a Grade 2-3 adenocarcinoma with lymph node involvement.

[0389] FIG. 145A-145C shows photographs, array map and description of esophageal cancer tissue array BC001113 stained with the anti-PSMGFR antibody 18G12 at 30 ug/mL. FIG. 145A shows photographs of the tissue micro array. FIG. 145B shows map of the array with abbreviated tissue descriptors. FIG. 145C detailed description of the tissue micro array with non-identifying donor data.

[0390] FIG. 146A-146F shows photographs of specific tissues from esophageal cancer tissue array BC001113 stained with the anti-PSMGFR antibody 18G12 at 30 ug/mL, magnified to 6× and 20×. FIG. 146A and FIG. 146D are photographs of the specimen at position A1. FIG. 146B and FIG. 146E are photographs of the specimen at position A7. FIG. 146C and FIG. 146F are photographs of the specimen at position A8.

[0391] FIG. 147A-147C shows photographs, array map and description of FDA normal tissue array 1021 stained with the anti-PSMGFR antibody 25E6 at 5.0 ug/mL. FIG. 147A shows photographs of the tissue micro array. FIG. 147B shows map of the array with abbreviated tissue descriptors. FIG. 147C detailed description of the tissue micro array with non-identifying donor data.

[0392] FIG. 148A-148X shows photographs of specific tissues from FDA normal tissue array 1021 stained with the anti-PSMGFR antibody 25E6 at 5.0 ug/mL, magnified to 6× and 20×. FIG. 148A and FIG. 148E are adrenal gland. FIG. 148B and FIG. 148F are breast. FIG. 148C and FIG. 148G are fallopian tube. FIG. 148D and FIG. 148H are kidney. FIG. 148I and FIG. 148M are heart muscle. FIG. 148J and FIG. 148N are liver. FIG. 148K and FIG. 148O are lung. FIG. 148L and FIG. 148P are ureter. FIG. 148Q and FIG. 148U are eye. FIG. 148R and FIG. 148V are cerebral cortex.

[0393] FIG. 148S and FIG. 148W are bone marrow. FIG. 148T and FIG. 148X are skeletal muscle.

[0394] FIG. 149A-149C shows photographs, array map and description of breast cancer tissue array 1141 stained with the anti-PSMGFR antibody 25E6 at 5.0 ug/mL. FIG. 149A shows photographs of the tissue micro array. FIG. 149B shows map of the array with abbreviated tissue descriptors. FIG. 149C detailed description of the tissue micro array with non-identifying donor data.

[0395] FIG. 150A-150F shows photographs of specific tissues from breast cancer tissue array 1141 stained with the anti-PSMGFR antibody 25E6 at 5.0 ug/mL, magnified to 6× and 20×. FIG. 150A and FIG. 150D are photographs of a Grade 2 invasive ductal carcinoma. FIG. 150B and FIG. 150E are photographs of a Grade 2 invasive ductal carcinoma. FIG. 150C and FIG. 150F are photographs of a Grade 2 invasive ductal carcinoma.

[0396] FIG. 151A-151C shows photographs, array map and description of pancreatic cancer tissue array PA1003 stained with the anti-PSMGFR antibody 25E6 at 5.0 ug/mL. FIG. 151A shows photographs of the tissue micro array. FIG. 151B shows map of the array with abbreviated tissue descriptors. FIG. 151C detailed description of the tissue micro array with non-identifying donor data.

[0397] FIG. 152A-152F shows photographs of specific tissues from pancreatic cancer tissue array PA1003 stained with the anti-PSMGFR antibody 25E6 at 5.0 ug/mL, magnified to 6× and 20×. FIG. 152A and FIG. 152D are photographs of a Grade 2 adenocarcinoma. FIG. 152B and FIG. 152E are photographs of a Grade 1 adenocarcinoma. FIG. 152C and FIG. 152F are photographs of a Grade 1 adenocarcinoma.

[0398] FIG. 153A-153C shows photographs, array map and description of FDA normal tissue array 1021 stained with the anti-PSMGFR antibody 28F9 at 15.0 ug/mL. FIG. 153A shows photographs of the tissue micro array. FIG. 153B shows map of the array with abbreviated tissue descriptors. FIG. 153C detailed description of the tissue micro array with non-identifying donor data.

[0399] FIG. 154A-154X shows photographs of specific tissues from FDA normal tissue array 1021 stained with the anti-PSMGFR antibody 28F9 at 15.0 ug/mL, magnified to 6× and 20×. FIG. 154A and FIG. 154E are adrenal gland. FIG. 154B and FIG. 154F are breast. FIG. 154C and FIG. 154G are fallopian tube. FIG. 154D and FIG. 154H are kidney. FIG. 154I and FIG. 154M are heart muscle. FIG. 154J and FIG. 154N are liver. FIG. 154K and FIG. 154O are lung. FIG. 154L and FIG. 154P are ureter. FIG. 154Q and FIG. 154U are eye. FIG. 154R and FIG. 154V are cerebral cortex. FIG. 154S and FIG. 154W are bone marrow. FIG. 154T and FIG. 154X are skeletal muscle.

[0400] FIG. 155A-155C shows photographs, array map and description of breast cancer tissue array 1141 stained with the anti-PSMGFR antibody 28F9 at 15.0 ug/mL. FIG. 155A shows photographs of the tissue micro array. FIG. 155B shows map of the array with abbreviated tissue descriptors. FIG. 155C detailed description of the tissue micro array with non-identifying donor data.

[0401] FIG. 156A-156F shows photographs of specific tissues from breast cancer tissue array 1141 stained with the anti-PSMGFR antibody 28F9 at 15.0 ug/mL, magnified to 6× and 20×. FIG. 156A and FIG. 156D are photographs of a Grade 2 invasive ductal carcinoma. FIG. 156B and FIG. 156E are photographs of a Grade 2 invasive ductal carcinoma. FIG. 156C and FIG. 156F are photographs of a Grade 2 invasive ductal carcinoma.

[0402] FIG. 157A-157C shows photographs, array map and description of FDA normal tissue array 1021 stained with the N+20/C−27 antibody 1E4 at 7.5 ug/mL. FIG. 157A shows photographs of the tissue micro array. FIG. 157B shows map of the array with abbreviated tissue descriptors. FIG. 157C detailed description of the tissue micro array with non-identifying donor data.

[0403] FIG. 158A-158X shows photographs of specific tissues from FDA normal tissue array 1021 stained with the N+20/C−27 antibody 1E4 at 7.5 ug/mL, magnified to 6× and 20×. FIG. 158A and FIG. 158E are adrenal gland. FIG. 158B and FIG. 158F are breast. FIG. 158C and FIG. 158G are fallopian tube. FIG. 158D and FIG. 158H are kidney. FIG. 158I and FIG. 158M are heart muscle. FIG. 158J and FIG. 158N are liver. FIG. 158K and FIG. 158O are lung. FIG. 158L and FIG. 158P are ureter. FIG. 158Q and FIG. 158U are eye. FIG. 158R and FIG. 158V are cerebral cortex. FIG. 158S and FIG. 158W are bone marrow. FIG. 158T and FIG. 158X are skeletal muscle.

[0404] FIG. 159A-159C shows photographs, array map and description of breast cancer tissue array BR1007 stained with the N+20/C−27 antibody 1E4 at 10.0 ug/mL. FIG. 159A shows photographs of the tissue micro array. FIG. 159B shows map of the array with abbreviated tissue descriptors. FIG. 159C detailed description of the tissue micro array with non-identifying donor data.

[0405] FIG. 160A-160F shows photographs of specific tissues from breast cancer tissue array BR1007 stained with the N+20/C−27 antibody 1E4 at 10.0 ug/mL, magnified to 6× and 20×. FIG. 160A and FIG. 160D are photographs of a Grade 2 invasive ductal carcinoma with positive lymph nodes. FIG. 160B and FIG. 160E are photographs of a Grade 2 invasive ductal carcinoma. FIG. 160C and FIG. 160F are photographs of a Grade 2 invasive ductal carcinoma.

[0406] FIG. 161A-161C shows photographs, array map and description of FDA normal tissue array 1021 stained with the N+20/C−27 antibody 29H1 at 0.5 ug/mL. FIG. 161A shows photographs of the tissue micro array. FIG. 161B shows map of the array with abbreviated tissue descriptors. FIG. 161C detailed description of the tissue micro array with non-identifying donor data.

[0407] FIG. 162A-162X shows photographs of specific tissues from FDA normal tissue array 1021 stained with the N+20/C−27 antibody 29H1 at 0.5 ug/mL, magnified to 6× and 20×. FIG. 162A and FIG. 162E are adrenal gland. FIG. 162B and FIG. 162F are breast. FIG. 162C and FIG. 162G are fallopian tube. FIG. 162D and FIG. 162H are kidney. FIG. 162I and FIG. 162M are heart muscle. FIG. 162J and FIG. 162N are liver. FIG. 162K and FIG. 162O are lung. FIG. 162L and FIG. 162P are ureter. FIG. 162Q and FIG. 162U are eye. FIG. 162R and FIG. 162V are cerebral cortex. FIG. 162S and FIG. 162W are bone marrow. FIG. 162T and FIG. 162X are skeletal muscle.

[0408] FIG. 163A-163C shows photographs, array map and description of breast cancer tissue array 1141 stained with the N+20/C−27 antibody 29H1 at 0.5 ug/mL. FIG. 163A shows photographs of the tissue micro array. FIG. 163B shows map of the array with abbreviated tissue descriptors. FIG. 163C detailed description of the tissue micro array with non-identifying donor data.

[0409] FIG. 164A-164F shows photographs of specific tissues from breast cancer tissue array 1141 stained with the N+20/C−27 antibody 29H1 at 0.5 ug/mL, magnified to 6× and 20×. FIG. 164A and FIG. 164D are photographs of a Grade 2 invasive ductal carcinoma. FIG. 164B and FIG. 164E are photographs of a Grade 2 invasive ductal carcinoma. FIG. 164C and FIG. 164F are photographs of a Grade 2 invasive ductal carcinoma.

[0410] FIG. 165A-165C shows photographs, array map and description of pancreatic cancer tissue array PA1003 stained with the N+20/C−27 antibody 29H1 at 0.5 ug/mL. FIG. 165A shows photographs of the tissue micro array. FIG. 165B shows map of the array with abbreviated tissue descriptors. FIG. 165C detailed description of the tissue micro array with non-identifying donor data.

[0411] FIG. 166A-166F shows photographs of specific tissues from pancreatic cancer tissue array PA1003 stained with the N+20/C−27 antibody 29H1 at 0.5 ug/mL, magnified to 6× and 20×. FIG. 166A and FIG. 166D are photographs of a Grade 2 adenocarcinoma. FIG. 166B and FIG. 166E are photographs of a Grade 2 adenocarcinoma. FIG. 166C and FIG. 166F are photographs of a Grade 3 adenocarcinoma.

[0412] FIG. 167A-167C shows photographs, array map and description of FDA normal tissue array 1021 stained with the N+20/C−27 antibody 31A1 at 0.5 ug/mL. FIG. 167A shows photographs of the tissue micro array. FIG. 167B shows map of the array with abbreviated tissue descriptors. FIG. 167C detailed description of the tissue micro array with non-identifying donor data.

[0413] FIG. 168A-168X shows photographs of specific tissues from FDA normal tissue array 1021 stained with the N+20/C−27 antibody 31A1 at 0.5 ug/mL, magnified to 6× and 20×. FIG. 168A and FIG. 168E are adrenal gland. FIG. 168B and FIG. 168F are breast. FIG. 168C and FIG. 168G are fallopian tube. FIG. 168D and FIG. 168H are kidney. FIG. 168I and FIG. 168M are heart muscle. FIG. 168J and FIG. 168N are liver. FIG. 168K and FIG. 168O are lung. FIG. 168L and FIG. 168P are ureter. FIG. 168Q and FIG. 168U are eye. FIG. 168R and FIG. 168V are cerebral cortex. FIG. 168S and FIG. 168W are bone marrow. FIG. 168T and FIG. 168X are skeletal muscle.

[0414] FIG. 169A-169C shows photographs, array map and description of breast cancer tissue array 1141 stained with the N+20/C−27 antibody 31A1 at 0.5 ug/mL. FIG. 169A shows photographs of the tissue micro array. FIG. 169B shows map of the array with abbreviated tissue descriptors. FIG. 169C detailed description of the tissue micro array with non-identifying donor data.

[0415] FIG. 170A-170F shows photographs of specific tissues from breast cancer tissue array 1141 stained with the N+20/C−27 antibody 31A1 at 0.5 ug/mL, magnified to 6× and 20×. FIG. 170A and FIG. 170D are photographs of a Grade 2 invasive ductal carcinoma. FIG. 170B and FIG. 170E are photographs of a Grade 2 invasive ductal carcinoma. FIG. 170C and FIG. 170F are photographs of a Grade 2 invasive ductal carcinoma.

[0416] FIG. 171A-171C shows photographs, array map and description of pancreatic cancer tissue array PA1003 stained with the N+20/C−27 antibody 31A1 at 0.5 ug/mL. FIG. 171A shows photographs of the tissue micro array. FIG. 171B shows map of the array with abbreviated tissue descriptors. FIG. 171C detailed description of the tissue micro array with non-identifying donor data.

[0417] FIG. 172A-172F shows photographs of specific tissues from pancreatic cancer tissue array PA1003 stained with the N+20/C−27 antibody 31A1 at 0.5 ug/mL, magnified to 6× and 20×. FIG. 172A and FIG. 172D are photographs of a Grade 1 adenocarcinoma. FIG. 172B and FIG. 172E are photographs of a Grade 2 adenocarcinoma. FIG. 172C and FIG. 172F are photographs of a Grade 3 adenocarcinoma.

[0418] FIG. 173A-173C shows photographs, array map and description of FDA normal tissue array 1021 stained with the N+20/C−27 antibody 32C1 at 0.25 ug/mL. FIG. 173A shows photographs of the tissue micro array. FIG. 173B shows map of the array with abbreviated tissue descriptors. FIG. 173C detailed description of the tissue micro array with non-identifying donor data.

[0419] FIG. 174A-174X shows photographs of specific tissues from FDA normal tissue array 1021 stained with the N+20/C−27 antibody 32C1 at 0.25 ug/mL, magnified to 6× and 20×. FIG. 174A and FIG. 174E are adrenal gland. FIG. 174B and FIG. 174F are breast. FIG. 174C and FIG. 174G are fallopian tube. FIG. 174D and FIG. 174H are kidney. FIG. 174I and FIG. 174M are heart muscle. FIG. 174J and FIG. 174N are liver. FIG. 174K and FIG. 174O are lung. FIG. 174L and FIG. 174P are ureter. FIG. 174Q and FIG. 174U are eye. FIG. 174R and FIG. 174V are cerebral cortex. FIG. 174S and FIG. 174W are bone marrow. FIG. 174T and FIG. 174X are skeletal muscle.

[0420] FIG. 175A-175C shows photographs, array map and description of breast cancer tissue array 1141 stained with the N+20/C−27 antibody 32C1 at 5.0 ug/mL. FIG. 175A shows photographs of the tissue micro array. FIG. 175B shows map of the array with abbreviated tissue descriptors. FIG. 175C detailed description of the tissue micro array with non-identifying donor data.

[0421] FIG. 176A-176F shows photographs of specific tissues from breast cancer tissue array 1141 stained with the N+20/C−27 antibody 32C1 at 5.0 ug/mL, magnified to 6× and 20×. FIG. 176A and FIG. 176D are photographs of a Grade 2 invasive ductal carcinoma. FIG. 176B and FIG. 176E are photographs of a Grade 2 invasive ductal carcinoma. FIG. 176C and FIG. 176F are photographs of a Grade 2 invasive ductal carcinoma.

[0422] FIG. 177A-177C shows photographs, array map and description of esophageal cancer tissue array ES1001 stained with the N+20/C−27 antibody 32C1 at 1.0 ug/mL. FIG. 177A shows photographs of the tissue micro array. FIG. 177B shows map of the array with abbreviated tissue descriptors. FIG. 177C detailed description of the tissue micro array with non-identifying donor data.

[0423] FIG. 178A-178F shows photographs of specific tissues from esophageal cancer tissue array BC001113 stained with the N+20/C−27 antibody 32C1 at 1.0 ug/mL, magnified to 6× and 20×. FIG. 178A and FIG. 178D are photographs of a squamous cell carcinoma. FIG. 178B and FIG. 178E are photographs of an adenocarcinoma. FIG. 178C and FIG. 178F are photographs of a squamous cell carcinoma.

[0424] FIG. 179A-179C shows photographs, array map and description of FDA normal tissue array 1021 stained with the N+20/C−27 antibody 45C11 at 12.5 ug/mL. FIG. 179A shows photographs of the tissue micro array. FIG. 179B shows map of the array with abbreviated tissue descriptors. FIG. 179C detailed description of the tissue micro array with non-identifying donor data.

[0425] FIG. 180A-180X shows photographs of specific tissues from FDA normal tissue array 1021 stained with the N+20/C−27 antibody 45C11 at 12.5 ug/mL, magnified to 6× and 20×. FIG. 180A and FIG. 180E are adrenal gland. FIG. 180B and FIG. 180F are breast. FIG. 180C and FIG. 180G are fallopian tube. FIG. 180D and FIG. 180H are kidney. FIG. 180I and FIG. 180M are heart muscle. FIG. 180J and FIG. 180N are liver. FIG. 180K and FIG. 180O are lung. FIG. 180L and FIG. 180P are ureter. FIG. 180Q and FIG. 180U are eye. FIG. 180R and FIG. 180V are cerebral cortex. FIG. 180S and FIG. 180W are bone marrow. FIG. 180T and FIG. 180X are skeletal muscle.

[0426] FIG. 181A-181C shows photographs, array map and description of breast cancer tissue array BR1007 stained with the N+20/C−27 antibody 45C11 at 10.0 ug/mL. FIG. 181A shows photographs of the tissue micro array. FIG. 181B shows map of the array with abbreviated tissue descriptors. FIG. 181C detailed description of the tissue micro array with non-identifying donor data.

[0427] FIG. 182A-182F shows photographs of specific tissues from breast cancer tissue array BR1007 stained with the N+20/C−27 antibody 45C11 at 10.0 ug/mL, magnified to 6× and 20×. FIG. 182A and FIG. 182D are photographs of a Grade 2 invasive ductal carcinoma with positive lymph nodes. FIG. 182B and FIG. 182E are photographs of a Grade 2 invasive ductal carcinoma. FIG. 182C and FIG. 182F are photographs of a Grade 2 invasive ductal carcinoma.

[0428] FIG. 183A-183C shows photographs, array map and description of pancreatic cancer tissue array PA805c stained with the N+20/C−27 antibody 45C11 at 12.5 ug/mL. FIG. 183A shows photographs of the tissue micro array. FIG. 183B shows map of the array with abbreviated tissue descriptors. FIG. 183C detailed description of the tissue micro array with non-identifying donor data.

[0429] FIG. 184A-184F shows photographs of specific tissues from pancreatic cancer tissue array PA805c stained with the N+20/C−27 antibody 45C11 at 12.5 ug/mL, magnified to 6× and 20×. FIG. 184A and FIG. 184D are photographs of a Grade 2 papillary adenocarcinoma. FIG. 184B and FIG. 184E are photographs of a Grade 2-3 ductal carcinoma. FIG. 184C and FIG. 184F are photographs of a Grade 3 invasive adenocarcinoma.

[0430] FIG. 185A-185C shows photographs, array map and description of FDA normal tissue array 1021 stained with the N+9/C−9 antibody 3C5 at 10.0 ug/mL. FIG. 185A shows photographs of the tissue micro array. FIG. 185B shows map of the array with abbreviated tissue descriptors. FIG. 185C detailed description of the tissue micro array with non-identifying donor data.

[0431] FIG. 186A-186X shows photographs of specific tissues from FDA normal tissue array 1021 stained with the N+9/C−9 antibody 3C5 at 10.0 ug/mL, magnified to 6× and 20×. FIG. 186A and FIG. 186E are adrenal gland. FIG. 186B and FIG. 186F are breast. FIG. 186C and FIG. 186G are fallopian tube. FIG. 186D and FIG. 186H are kidney. FIG. 186I and FIG. 186M are heart muscle. FIG. 186J and FIG. 186N are liver. FIG. 186K and FIG. 186O are lung. FIG. 186L and FIG. 186P are ureter. FIG. 186Q and FIG. 186U are eye. FIG. 186R and FIG. 186V are cerebral cortex. FIG. 186S and FIG. 186W are bone marrow. FIG. 186T and FIG. 186X are skeletal muscle.

[0432] FIG. 187A-187C shows photographs, array map and description of pancreatic cancer tissue array PA1003 stained with the N+9/C−9 antibody 3C5 at 10.0 ug/mL. FIG. 187A shows photographs of the tissue micro array. FIG. 187B shows map of the array with abbreviated tissue descriptors. FIG. 187C detailed description of the tissue micro array with non-identifying donor data.

[0433] FIG. 188A-188F shows photographs of specific tissues from pancreatic cancer tissue array PA1003 stained with the N+9/C−9 antibody 3C5 at 10.0 ug/mL, magnified to 6× and 20×. FIG. 188A and FIG. 188D are photographs of a Grade 2 adenocarcinoma. FIG. 188B and FIG. 188E are photographs of a Grade 2 adenocarcinoma. FIG. 188C and FIG. 188F are photographs of a Grade 2-3 adenocarcinoma with lymph node involvement.

[0434] FIG. 189A-189C shows photographs, array map and description of FDA normal tissue array 1021 stained with the N+9/C−9 antibody 8A9 at 15.0 ug/mL. FIG. 189A shows photographs of the tissue micro array. FIG. 189B shows map of the array with abbreviated tissue descriptors. FIG. 189C detailed description of the tissue micro array with non-identifying donor data.

[0435] FIG. 190A-190X shows photographs of specific tissues from FDA normal tissue array 1021 stained with the N+9/C−9 antibody 8A9 at 15.0 ug/mL, magnified to 6× and 20×. FIG. 190A and FIG. 190E are adrenal gland. FIG. 190B and FIG. 190F are breast. FIG. 190C and FIG. 190G are fallopian tube. FIG. 190D and FIG. 190H are kidney. FIG. 190I and FIG. 190M are heart muscle. FIG. 190J and FIG. 190N are liver. FIG. 190K and FIG. 190O are lung. FIG. 190L and FIG. 190P are ureter. FIG. 190Q and FIG. 190U are eye. FIG. 190R and FIG. 190V are cerebral cortex. FIG. 190S and FIG. 190W are bone marrow. FIG. 190T and FIG. 190X are skeletal muscle.

[0436] FIG. 191A-191C shows photographs, array map and description of pancreatic cancer tissue array PA1003 stained with the N+9/C−9 antibody 8A9 at 15.0 ug/mL. FIG. 191A shows photographs of the tissue micro array. FIG. 191B shows map of the array with abbreviated tissue descriptors. FIG. 191C detailed description of the tissue micro array with non-identifying donor data.

[0437] FIG. 192A-192F shows photographs of specific tissues from pancreatic cancer tissue array PA1003 stained with the N+9/C−9 antibody 8A9 at 15.0 ug/mL, magnified to 6× and 20×. FIG. 192A and FIG. 192D are photographs of a Grade 2 adenocarcinoma. FIG. 192B and FIG. 192E are photographs of a Grade 2 adenocarcinoma. FIG. 192C and FIG. 192F are photographs of a Grade 2 adenocarcinoma.

[0438] FIG. 193A-193C shows photographs, array map and description of FDA normal tissue array 1021 stained with the N+9/C−9 antibody 17H6 at 30.0 ug/mL. FIG. 193A shows photographs of the tissue micro array. FIG. 193B shows map of the array with abbreviated tissue descriptors. FIG. 193C detailed description of the tissue micro array with non-identifying donor data.

[0439] FIG. 194A-194X shows photographs of specific tissues from FDA normal tissue array 1021 stained with the N+9/C−9 antibody 17H6 at 30.0 ug/mL, magnified to 6× and 20×. FIG. 194A and FIG. 194E are adrenal gland. FIG. 194B and FIG. 194F are breast. FIG. 194C and FIG. 194G are fallopian tube. FIG. 194D and FIG. 194H are kidney. FIG. 194I and FIG. 194M are heart muscle. FIG. 194J and FIG. 194N are liver. FIG. 194K and FIG. 194O are lung. FIG. 194L and FIG. 194P are ureter. FIG. 194Q and FIG. 194U are eye. FIG. 194R and FIG. 194V are cerebral cortex. FIG. 194S and FIG. 194W are bone marrow. FIG. 194T and FIG. 194X are skeletal muscle.

[0440] FIG. 195A-195C shows photographs, array map and description of pancreatic cancer tissue array PA805c stained with the N+9/C−9 antibody 17H6 at 30.0 ug/mL. FIG. 195A shows photographs of the tissue micro array. FIG. 195B shows map of the array with abbreviated tissue descriptors. FIG. 195C detailed description of the tissue micro array with non-identifying donor data.

[0441] FIG. 196A-196F shows photographs of specific tissues from pancreatic cancer tissue array PA805c stained with the N+9/C−9 antibody 17H6 at 30.0 ug/mL, magnified to 6× and 20×. FIG. 196A and FIG. 196D are photographs of a Grade 2 papillary adenocarcinoma. FIG. 196B and FIG. 196E are photographs of a Grade 2-3 ductal carcinoma with lymph node involvement. FIG. 196C and FIG. 196F are photographs of a Grade 3 invasive adenocarcinoma.

[0442] FIG. 197A-197C shows photographs, array map and description of FDA normal tissue array 1021 stained with the N+9/C−9 antibody 39H5 at 5.0 ug/mL. FIG. 197A shows photographs of the tissue micro array. FIG. 197B shows map of the array with abbreviated tissue descriptors. FIG. 197C detailed description of the tissue micro array with non-identifying donor data.

[0443] FIG. 198A-198X shows photographs of specific tissues from FDA normal tissue array 1021 stained with the N+9/C−9 antibody 39H5 at 5.0 ug/mL, magnified to 6× and 20×. FIG. 198A and FIG. 198E are adrenal gland. FIG. 198B and FIG. 198F are breast. FIG. 198C and FIG. 198G are fallopian tube. FIG. 198D and FIG. 198H are kidney. FIG. 198I and FIG. 198M are heart muscle. FIG. 198J and FIG. 198N are liver. FIG. 198K and FIG. 198O are lung. FIG. 198L and FIG. 198P are ureter. FIG. 198Q and FIG. 198U are eye. FIG. 198R and FIG. 198V are cerebral cortex. FIG. 198S and FIG. 198W are bone marrow. FIG. 198T and FIG. 198X are skeletal muscle.

[0444] FIG. 199A-199C shows photographs, array map and description of pancreatic cancer tissue array PA1003 stained with the N+9/C−9 antibody 39H5 at 5.0 ug/mL. FIG. 199A shows photographs of the tissue micro array. FIG. 199B shows map of the array with abbreviated tissue descriptors. FIG. 199C detailed description of the tissue micro array with non-identifying donor data.

[0445] FIG. 200A-200F shows photographs of specific tissues from pancreatic cancer tissue array PA1003 stained with the N+9/C−9 antibody 39H5 at 5.0 ug/mL, magnified to 6× and 20×. FIG. 200A and FIG. 200D are photographs of a Grade 2 adenocarcinoma. FIG. 200B and FIG. 200E are photographs of a Grade 2 adenocarcinoma. FIG. 200C and FIG. 200F are photographs of a Grade 2 adenocarcinoma.

[0446] FIG. 201A-201C show graphs of ELISA assays to determine the binding of another set of antibodies generated by immunizing animals with the PSMGFR peptide. FIG. 201A shows binding to the PSMGFR peptide. FIG. 201B shows binding to the N−10 peptide. FIG. 201C shows binding to the C−10 peptide. As can be seen, none of the antibodies bound to the C−10 peptide. F3, B12, B2, B7, B9, 8C7F3 and H11 all bound to the PSMGFR peptide and to the N−10 peptide.

[0447] FIG. 202A-202C shows photographs of pancreatic cancer tissue array PA1003 that has been stained with monoclonal antibody 1E4, monoclonal antibody 18B4 or the polyclonal anti-PSMGFR antibody SDIX. 18B4 binds to the GTINVHDVET epitope at the most N-terminal portion of the PSMGFR peptide, while the 1E4 antibody binds to the QFNQYKTEA epitope that is immediately adjacent and C-terminal to the 18B4 epitope.

[0448] FIG. 203A-203F shows magnified images of the tissue specimen at position A2 of the pancreatic cancer array PA1003. FIG. 203A and FIG. 203B show the specimen stained with antibody 1E4. FIG. 203C and FIG. 203D show the specimen stained with antibody 18B4. FIG. 203E and FIG. 203F show the specimen stained with polyclonal antibody SDIX.

[0449] FIG. 204A-204D shows magnified images of the tissue specimen at position D4 of the pancreatic array PA1003. FIG. 204A and FIG. 204B show the specimen stained with antibody 18B4. FIG. 204C and FIG. 204D show the specimen stained with polyclonal antibody SDIX.

[0450] FIG. 205A-205D shows magnified images of the tissue specimen at position E1 of the pancreatic cancer array PA1003. FIG. 205A and FIG. 205B show the specimen stained with antibody 18B4. FIG. 205C and FIG. 205D show the specimen stained with polyclonal antibody SDIX.

[0451] FIG. 206A-206D shows magnified images of the tissue specimen at position C3 of the pancreatic cancer array PA1003. FIG. 206A and FIG. 206B show the specimen stained with antibody 1E4. FIG. 206C and FIG. 206D show the specimen stained with polyclonal antibody SDIX.

[0452] FIG. 207A-207D shows magnified images of the tissue specimen at position D1 of the pancreatic cancer array PA1003. FIG. 207A and FIG. 207B show the specimen stained with antibody 1E4. FIG. 207C and FIG. 207D show the specimen stained with polyclonal antibody SDIX.

[0453] FIG. 208A-208C shows photographs of the pancreatic cancer array PA1003. FIG. 208A shows the specimen stained with polyclonal antibody SDIX. FIG. 208B shows the specimen stained with antibody 20A10. FIG. 208C shows the specimen stained with antibody 29H1.

[0454] FIG. 209A-209D shows photographs of the esophageal cancer array ES1001 stained with various antibodies. FIG. 209A shows the array stained with polyclonal antibody SDIX. FIG. 209B shows the array stained with antibody 20A10. FIG. 209C shows the array stained with antibody 29H1. FIG. 209D shows the array stained with antibody 31A1.

[0455] FIG. 210A-210C shows photographs of the pancreatic cancer array PA1003 stained with various antibodies. FIG. 210A shows the array stained with polyclonal antibody SDIX. FIG. 210B shows the array stained with antibody 20A10. FIG. 210C shows the array stained with antibody 29H1.

[0456] FIG. 211A- 211C show graphs of an ELISA experiment measuring the amount of IL-18 secreted into the condition media of MUC1* positive cancer cells co-cultured with huMNC2-CAR44 T cells wherein the cells also bear an NFAT inducible IL-18. FIG. 211A shows the graph of IL-18 secreted into the supernatant of T47D breast cancer cells co-cultured with untransduced human T cells. FIG. 211B shows the graph of IL-18 secreted into the supernatant of T47D breast cancer cells co-cultured with huMNC2-CAR44 T cells that also bore an NFAT inducible IL-18 gene inserted into a portion of the Foxp3 enhancer. FIG. 211C shows the graph of IL-18 secreted into the supernatant of T47D breast cancer cells co-cultured with huMNC2-CAR44 T cells that also bore an NFAT inducible IL-18 gene inserted into a portion of the IL-2 enhancer.

[0457] FIG. 212A- 212X shows photographs of T47D breast cancer cells (red) doped with varying percentages of T47D cells engineered to express more MUC1* (green). The target cancer cells have been co-cultured with huMNC2-CAR44 T cells with NFAT inducible IL-18 wherein the IL-18 gene has been inserted into either the Foxp3 enhancer/promoter or the IL-2 enhancer/promoter. FIGS. 212A-212C, 212I-212K, and 212Q-212S show the cancer cells co-cultured with untranduced T cells. FIGS. 212D-212F, 212L-212N, and 212T-212V show the cancer cells co-cultured with hiMNC2-CAR44 T cells with the NFAT inducible IL-18 gene inserted into the Foxp3 enhancer/promoter. FIGS. 212G-212H, 212O-212P, and 212W-212X show the cancer cells co-cultured with hiMNC2-CAR44 T cells with the NFAT inducible IL-18 gene inserted into the IL-2 enhancer/promoter.

[0458] FIG. 213A- 213B shows graphs of ELISA experiments in which levels of IL-18 secreted into the conditioned media are measured for huMNC1-CAR44 T cells with NFAT inducible IL-18 gene, inserted into the Foxp3 enhancer or promoter, co-cultured with either MUC1* positive cancer cells or MUC1 negative non-cancerous cells. FIG. 213A shows IL-18 secretion from huMNC2-CAR44 T cells with NFAT inducible IL-18 in co-culture with T47D breast cancer cells where the population has been doped with 5%, 10% or 30% T47D cells that had been transfected with even more MUC1*. FIG. 213B shows IL-18 secretion from huMNC2-CAR44 T cells with NFAT inducible IL-18 in co-culture with non-cancerous, MUC1 negative HEK293 cells where the cell population has been doped with 5%, 10% or 30% T47D cells that had been transfected with more MUC1*.

[0459] FIG. 214A-214X shows photographs of T47D breast cancer cells (red) or non-cancerous HEK293 cells (also red), where both cell types have been doped with varying percentages of T47D cells engineered to express more MUC1* (green). These target cancer cells have been co-cultured with huMNC2-CAR44 T cells with NFAT inducible IL-18 wherein the IL-18 gene has been inserted into the Foxp3 enhancer/promoter. FIG. 214A-214F shows either T47D cells or HEK293 cells that have not been doped with T47D cells engineered to express high MUC1* density. FIG. 214G-214L shows either T47D cells or HEK293 cells that have been doped with 5% T47D cells engineered to express high MUC1* density. FIG. 214M-214R shows either T47D cells or HEK293 cells that have been doped with 10% T47D cells engineered to express high MUC1* density. FIG. 214S-214X shows either T47D cells or HEK293 cells that have been doped with 30% T47D cells engineered to express high MUC1* density. FIGS. 214A-B, G-H, M-N, and S-T show T47D breast cancer cells. FIGS. 214C-F, I-L, O-R, and U-X show HEK293 cells. As can be seen in the figures, the induced secretion of IL-18 resulted in low MUC1* density T47D cells being killed but did not induce non-specific killing of the MUC1* negative HEK293 cells.

[0460] FIG. 215A-215C shows the consensus sequences of the heavy chain CDRs wherein the consensus sequences were generated for each group of antibodies that bound to the same epitope in the PSMGFR and N-terminally extended PSMGFR peptide. FIG. 215A shows consensus sequences for heavy chain CDR1. FIG. 215B shows consensus sequences for heavy chain CDR2.

[0461] FIG. 215C shows consensus sequences for heavy chain CDR3.

[0462] FIG. 216A-216C shows the consensus sequences of the light chain CDRs wherein the consensus sequences were generated for each group of antibodies that bound to the same epitope in the PSMGFR and N-terminally extended PSMGFR peptide. FIG. 216A shows consensus sequences for light chain CDR1. FIG. 216B shows consensus sequences for light chain CDR2. FIG. 216C shows consensus sequences for light chain CDR3.

### DETAILED DESCRIPTION OF THE PREFERRED EMBODIMENTS

[0463] In the present application, “a” and “an” are used to refer to both single and a plurality of objects.

[0464] As used herein, occasionally, in short hand, a polypeptide is indicated as being “transduced or transfected” into a cell. In these occurrences, it is understood that the nucleic acid encoding the polypeptide sequence is transduced or transfected into the cell, as it is an impossibility that a polypeptide could be transduced or transfected into a cell.

[0465] As used herein, occasionally when referring to number of cells injected into an animal or otherwise contextually wherein the number of cells is referred to, “M” refers to millions, and “K” refers to thousands.

[0466] As used herein, interchangeable designations for various monoclonal antibodies are used, such as, “MN-C2”, which is interchangeable with “C2”, “Min-C2” and “MNC2”; “MN-E6”, which is interchangeable with “E6”, “Min-E6” and “MNE6”; “MN-C3”, which is interchangeable with “C3”, “Min-C3” and “MNC3”; and “MN-C8”, which is interchangeable with “C8”, “Min-C8” and “MNC8”. The monoclonal antibodies provided herein follow the same convention.

[0467] As used herein, “h” or “hu” placed before an antibody construct is short-hand for humanized.

[0468] As used herein, the term “antibody-like” means a molecule that may be engineered such that it contains portions of antibodies but is not an antibody that would naturally occur in nature. Examples include but are not limited to CAR (chimeric antigen receptor) T cell technology and the Ylanthia® technology. The CAR technology uses an antibody epitope fused to a portion of a T cell so that the body's immune system is directed to attack a specific target protein or cell. The Ylanthia® technology consists of an “antibody-like” library that is a collection of synthetic human Fabs that are then screened for binding to peptide epitopes from target proteins. The selected Fab regions can then be engineered into a scaffold or framework so that they resemble antibodies.

[0469] As used herein, “PSMGFR” is abbreviation for Primary Sequence of the MUC1 Growth Factor Receptor which is identified by SEQ ID NO:2, and thus is not to be confused with a six amino acid sequence. “PSMGFR peptide” or “PSMGFR region” refers to a peptide or region that incorporates the Primary Sequence of the MUC1 Growth Factor Receptor (SEQ ID NO:2).

[0470] As used herein, the “MUC1*” extra cellular domain is defined primarily by the PSMGFR sequence (GTINVHDVETQFNQYKTEAASRYNLTISDVSVSDVPFPFSAQSGA (SEQ ID NO:2)). Because the exact site of MUC1 cleavage depends on the enzyme that clips it, and that the cleavage enzyme varies depending on cell type, tissue type or the time in the evolution of the cell, the exact sequence of the MUC1* extra cellular domain may vary at the N-terminus.

[0471] Other clipped amino acid sequences may include SNIKFRPGSVVVQLTLAFREGTINVHDVETQFNQYKTEAASRY (SEQ ID NO:620); or SVVVQLTLAFREGTINVHDVETQFNQYKTEAASRY (SEQ ID NO:621).

[0472] As used herein, the term “PSMGFR” is an acronym for Primary Sequence of MUC1 Growth Factor Receptor as set forth as GTINVHDVETQFNQYKTEAASRYNLTISDVSVSDVPFPFSAQSGA (SEQ ID NO:2). In this regard, the “N-number” as in “N−10 PSMGFR” or simply “N−10”, “N−15 PSMGFR” or simply “N−15”, or “N−20 PSMGFR” or simply “N−20” refers to the number of amino acid residues that have been deleted at the N-terminal end of PSMGFR. Likewise “C-number” as in “C−10 PSMGFR” or simply “C−10”, “C−15 PSMGFR” or simply “C−15”, or “C−20 PSMGFR” or simply “C−20” refers to the number of amino acid residues that have been deleted at the C-terminal end of PSMGFR. A mixture of deletions and additions is also possible. For instance, N+20/C−27 refers to a peptide fragment of wild-type MUC1 in which 20 amino acids are added to the PSMGFR at the N-terminus and 27 amino acids are deleted from the C-terminus.

[0473] As used herein, the “extracellular domain of MUC1*” refers to the extracellular portion of a MUC1 protein that is devoid of the tandem repeat domain. In most cases, MUC1* is a cleavage product wherein the MUC1* portion consists of a short extracellular domain devoid of tandem repeats, a transmembrane domain and a cytoplasmic tail. The precise location of cleavage of MUC1 is not known perhaps because it appears that it can be cleaved by more than one enzyme. The extracellular domain of MUC1* will include most of the PSMGFR sequence but may have an additional 10-20 N-terminal amino acids.

[0474] As used herein “sequence identity” means homology in sequence of a particular polypeptide or nucleic acid to a reference sequence of nucleic acid or amino acid such that the function of the homologous peptide is the same as the reference peptide or nucleic acid. Such homology can be so close with the reference peptide such that at times the two sequences may be 90%, 95% or 98% identical yet possess the same function in binding or other biological activities.

[0475] As used herein, “MUC1 positive” cell refers to a cell that expresses a gene for MUC1, MUC1-Y or MUC1-Z or other MUC1 variant.

[0476] As used herein, “MUC1 negative” cell refers to a cell that does not express a gene for MUC1.

[0477] As used herein, “MUC1* positive” cell refers to a cell that expresses a gene for MUC1, wherein that gene's expressed protein is a transmembrane protein that is devoid of tandem repeats, which may be a consequence of post-translational modification, cleavage, alternative splicing, or transfecting or transducing a cell with a MUC1 protein that is devoid of tandem repeats.

[0478] As used herein, “MUC1* negative” cell refers to a cell that may or may not express a gene for MUC1 but does not express a MUC1 transmembrane protein that is devoid of tandem repeats.

[0479] As used herein, “MUC1 positive” cancer cell refers to a cancer cell that overexpresses the gene for MUC1, expresses MUC1 in an aberrant pattern, wherein its expression is not restricted to the apical border and/or expresses a MUC1 that is devoid of tandem repeats.

[0480] As used herein, “MUC1 negative” cancer cell refers to a cancer cell that may or may not express a gene for MUC1 but does not overexpress MUC1 or does not overexpress a MUC1 transmembrane protein that is devoid of tandem repeats.

[0481] As used herein, “MUC1* positive” cancer cell refers to a cancer cell that overexpresses a MUC1 transmembrane protein that is devoid of tandem repeats.

[0482] As used herein, “MUC1* negative” cancer cell refers to a cancer cell that may or may not express a gene for MUC1 but does not overexpress a MUC1 transmembrane protein that is devoid of tandem repeats.

[0483] As used herein “conformational epitope” refers to a peptide sequence that is required to be present in a specific three-dimensional structure or conformation for an antibody to bind. However the antibody binds when the peptide sequence is in the three-dimensional structure or conformation and is not bound when linear. A common technique for determining whether an antibody binds to a linear stretch or a conformational epitope is to use the antibody to probe a denaturing Western blot. Traveling through a denaturing gel linearizes proteins and peptides. Antibodies that do not work in a denaturing Western but do recognize the native target, for example expressed on an intact cell, are determined to recognize a conformational epitope. As used herein, the antibody may or may not actually bind to the “conformational epitope”, however the presence of the “conformational epitope” sequence is required to render a three dimensional structure so that the MUC1* region on cancer cells is able to be bound by the antibody that is specific for cancer treatment. Thus, the conformational epitope is an amino acid sequence that induces the binding of the antibody to the MUC1* region on cancer cells. Thus, a term “conformational inducing peptide sequence” may be used, which indicates that a peptide sequence is present within a larger peptide not as a binding site but that induces binding of an antibody to the larger peptide by causing a three-dimensional structure to form that facilitates the binding of the antibody to the larger peptide.

[0484] MUC1* antibodies (anti-PSMGFR) for treatment or prevention of cancers

[0485] We discovered that a cleaved form of the MUC1 (SEQ ID NO:1) transmembrane protein is a growth factor receptor that drives the growth of over 75% of all human solid tumor cancers. The cleaved form of MUC1, which we called MUC1* (pronounced muk 1 star), is a powerful growth factor receptor. Enzymatic cleavage releases the bulk of the MUC1 extracellular domain. It is the remaining portion comprising a truncated extracellular domain, transmembrane domain and cytoplasmic tail that is called MUC1*. Cleavage and release of the bulk of the extracellular domain of MUC1 unmasks a binding site for activating ligands dimeric NME1, NME6, NME8, NME7_{AB}, NME7-X1 or NME7. Cell growth assays show that it is ligand-induced dimerization of the MUC1* extracellular domain that promotes growth (FIG. 1A-1D). MUC1* positive cells treated with either bivalent ‘by’ anti-MUC1* antibody, monovalent ‘my’ or Fab, NM23-H1 dimers or NME7-AB. Bivalent anti-MUC1* antibodies stimulate growth of cancer cells whereas the monovalent Fab inhibits growth. Classic bell-shaped curve indicates ligand induced dimerization stimulates growth. Dimeric NM23-H1, aka NME1, stimulates growth of MUC1* positive cancer cells but siRNA to suppress MUC1 expression eliminate its effect (FIG. 1C). NME7-AB also stimulates the growth of MUC1* positive cells (FIG. 1D).

[0486] MUC1* is an excellent target for cancer drugs as it is aberrantly expressed on over 75% of all cancers and is likely overexpressed on an even higher percentage of metastatic cancers. After MUC1 cleavage, most of its extracellular domain is shed from the cell surface. The remaining portion has a truncated extracellular domain that at least comprises the primary growth factor receptor sequence, PSMGFR (SEQ ID NO:2). Antibodies that bind to the PSMGFR sequence and especially those that competitively inhibit the binding of activating ligands such as NME proteins, including NME1, NME6, NME8, NME7_{AB}, NME7-X1 and NME7, are ideal therapeutics and can be used to treat or prevent MUC1 positive or MUC1* positive cancers, as stand-alone antibodies, antibody fragments or variable region fragments thereof incorporated into bispecific antibodies, or chimeric antigen receptors also called CARs, which are then transfected or transduced into immune cells, then administered to a patient.

[0487] Therapeutic anti-MUC1* antibodies can be monoclonal, polyclonal, antibody mimics, engineered antibody-like molecules, full antibodies or antibody fragments. Examples of antibody fragments include but are not limited to Fabs, scFv, and scFv-Fc. Human or humanized antibodies are preferred for use in the treatment or prevention of cancers. In any of these antibody-like molecules, mutations can be introduced to prevent or minimize dimer formation. Anti-MUC1* antibodies that are monovalent or bispecific are preferred because MUC1* function is activated by ligand induced dimerization. Typical binding assays show that NME1 and NME7_{AB} bind to the PSMGFR peptide portion of MUC1* (FIG. 2A, 2D). Further, they show that these activating growth factors bind to the membrane proximal portion of MUC1*, as they do not bind to the PSMGFR peptide if the 10 C-terminal amino acids are missing. Similarly, anti-MUC1* antibodies MN-C2 and MN-E6 bind to the PSMGFR peptide if an only if the 10 C-terminal amino acids are present (FIG. 2B, 2C). Antibodies MN-C3 and MN-C8 bind to epitopes that are different from MN-C2 and MN-E6, as they do not depend on the presence of the 10 C-terminal amino acids of the PSMGFR peptide (FIG. 2E, 2F). Antibodies MN-C2, MN-E6, or fragments derived from them, can be administered to a patient for the treatment or prevention of cancers, as stand-alone antibodies or incorporated into bispecific antibodies, BiTEs or chimeric antigen receptors also called CARs that have been transduced into immune cells. MNC2 and MNE6 and other anti-MUC1* antibodies that competitively inhibit the binding of NME1 and NME7_{AB} are preferred for use as stand alone antibody therapeutics.

[0488] Therapeutic anti-MUC1* antibodies for use as a stand alone antibody therapeutic or for integration into a BiTE or a CAR can be selected based on specific criteria. The parent antibody can be generated using typical methods for generating monoclonal antibodies in animals. Alternatively, they can be selected by screening antibody and antibody fragment libraries for their ability to bind to a MUC1* peptide, which can be:

[0489] (i) PSMGFR region of MUC1;

[0490] (ii) PSMGFR peptide;

[0491] (iii) a peptide having amino acid sequence of

QFNQYKTEAASRYNLTISDVSVSDVPFPFSAQSGA(N-10)

[0492] (iv) a peptide having amino acid sequence of

ASRYNLTISDVSVSDVPFPFSAQSGA(N-19)

[0493] (v) a peptide having amino acid sequence of

NLTISDVSVSDVPFPFSAQSGA(N-23)

[0494] (vi) a peptide having amino acid sequence of

ISDVSVSDVPFPFSAQSGA(N-26)

[0495] (vii) a peptide having amino acid sequence of

SVSDVPFPFSAQSGA(N-30)

[0496] (viii) a peptide having amino acid sequence of

QFNQYKTEAASRYNLTISDVSVSDVPFPFS(N- 1O/C-5)

[0497] (ix) a peptide having amino acid sequence of

ASRYNLTISDVSVSDVPFPFS(N-19/C-5)

[0498] (x) a peptide having amino acid sequence of

FPFSAQSGA(N-36).

[0499] Resultant antibodies or antibody fragments generated or selected in this way can then be further selected by passing additional screens. For example, antibodies or antibody fragments become more preferred based on their ability to bind to MUC1* positive cancer cells or tissues but not to MUC1 negative cancer cells or to normal tissues. Further, anti-MUC1* antibodies or antibody fragments may be de-selected as anti-cancer therapeutics if they bind to stem or progenitor cells. Anti-MUC1* antibodies or antibody fragments become more preferred if they have the ability to competitively inhibit the binding of activating ligands to MUC1*. FIGS. 3A-3C shows that MN-E6 and MN-C2 competitively inhibit the binding of activating ligands NME1 and NME7 to MUC1*.

[0500] A process for selecting anti-MUC1* antibodies for use in treating a patient diagnosed with a MUC1 positive cancer, at risk of developing a MUC1 positive cancer or suspected of having a MUC1 positive cancer comprises one or more of the following steps of selecting antibodies or antibody fragments that 1) bind to the PSMGFR peptide; 2) bind to the N−10 PSMGFR peptide; 3) bind to cancer cells; 4) do not bind to stem or progenitor cells; and 5) competitively inhibited the binding of dimeric NME1 or NME7-AB to the PSMGFR peptide. For example, FIGS. 3A-3C show that monoclonals MN-E6 and MN-C2 satisfy all five criteria, while monoclonals MN-C3 and MN-C8 do not competitively inhibit the binding of activating ligands NME1 and NME7 (FIG. 3C). Recall that the MUC1* growth factor receptor is activated by ligand-induced dimerization of its extracellular domain. Therefore, the ideal antibody therapeutic should not dimerize the MUC1* extracellular domain. Preferably, suitable antibodies in this regard include monovalent antibodies such as those generated in lamas and camels, Fabs, scFv's, single domain antibodies (sdAb), scFv-Fc as long as the Fc portion is constructed such that it does not homo-dimerize.

[0501] FACS scans show that anti-MUC1* antibodies MN-C2 and MN-E6 specifically bind to MUC1* positive solid tumor cancer cells and MUC1* transfected cells but not MUC1* negative or MUC1 negative cells. In one example, a humanized MN-C2 scFv is shown to bind to ZR-75-1, aka 1500, MUC1* positive breast cancer cells (FIG. 4A-4C). MN-E6 was shown to bind to MUC1 negative HCT-116 colon cancer cells if an only if they were transfected with MUC1*. MN-E6 also bound to MUC1* positive cancer cells such as ZR-75-1, aka 1500, MUC1* positive breast cancer cells (FIG. 4D-4F). Binding assays such as ELISAs, immunofluorescence, and the like all confirm that MN-C2 and MN-E6 bind to the PSMGFR peptide and to live MUC1 positive cancer cells. Humanized anti-MUC1* antibodies are selected based on their ability to also bind to the PSMGFR peptide or to MUC1 positive cancer cells. FIG. 5 shows that humanized MN-C2 scFv binds with high affinity to the MUC1* peptide PSMGFR with an EC−50 of about 333 nM. Humanized MN-C2 scFv, like Fabs, potently inhibits the growth of MUC1* positive cancer cells as is shown in one example in FIGS. 6A, 6B. Like the parent antibodies, humanized scFv's show the same binding pattern. huMNE6-scFv binds to the PSMGFR peptide, binds to the N−10 peptide but does not bind to the C−10 peptide (SEQ ID NO:825) (FIG. 8). Murine or humanized MNC3-scFv binds to the, PSMGFR peptide, binds to the N−10 peptide and binds to the C−10 peptide (FIG. 9).

[0502] The Fabs of MN-E6 and MN-C2 or the comparable single chain variable regions derived from them potently inhibit the growth of MUC1* positive cancers in vitro and in vivo. In several examples, the Fabs of Anti-MUC1* antibodies inhibited the growth of human MUC1* positive cancers in vivo. In one case, immune-compromised mice were implanted with human breast tumors then treated with MN-E6 Fab after tumor engraftment. FIG. 7A shows that MN-E6 Fab potently inhibited the growth of MUC1* positive breast cancers. Female nu/nu mice implanted with 90-day estrogen pellets were implanted with 6 million T47D human breast cancer cells that had been mixed 50/50 with Matrigel. Mice bearing tumors that were at least 150 mm³ and had three successive increases in tumor volume were selected for treatment. Animals were injected sub-cutaneously twice per week with 80 mg/kg MN-E6 Fab and an equal number of mice fitting the same selection criteria were injected with vehicle alone (FIG. 7A).

[0503] In another aspect, MN-E6 was shown to halt the growth of prostate cancer. FIG. 7B shows that MN-E6 Fab potently inhibited the growth of MUC1* positive prostate cancers. Male NOD/SCID mice were implanted with 6 million DU-145 human prostate cancer cells that had been mixed 50/50 with Matrigel. Mice bearing tumors that were at least 150 mm\hat{ }3 and had three successive increases in tumor volume were selected for treatment. Animals were injected sub-cutaneously every 48 hours with 160 mg/kg MN-E6 Fab and an equal number of mice fitting the same selection criteria were injected with vehicle alone (FIG. 7B). Tumors were measured independently by two researchers twice per week and recorded. Statistics were blindly calculated by independent statistician, giving a P value of 0.0001 for each. Anti-MUC1* Fab inhibited breast cancer growth and prostate cancer growth. Treatment had no effect on weight, bone marrow cell type or number. The MN-E6 Fab effectively inhibited the growth of the tumors, while the control group's tumors continued to grow until sacrifice. No adverse effects of treatment were observed or detected.

[0504] Recombinant forms of MN-E6 and MNC2 were constructed that like the Fab are monomeric. In this case, MN-E6 was humanized and MN-C2 was humanized. There are a number of methods known to those skilled in the art for humanizing antibodies. In addition to humanizing, libraries of human antibodies can be screened to identify other fully human antibodies that bind to the PSMGFR.

[0505] A single chain of the humanized MN-E6 variable region, called an scFv, was genetically engineered such that it was connected to the Fc portion of the antibody (SEQ ID NO:256 and 257). Fc regions impart certain benefits to antibody fragments for use as therapeutics. The Fc portion of an antibody recruits complement, which in general means it can recruit other aspects of the immune system and thus amplify the anti-tumor response beyond just inhibiting the target. The addition of the Fc portion also increases the half-life of the antibody fragment (Czajkowsky D M, Hu J, Shao Z and Pleass R J. (2012) Fc-fusion proteins: new developments and future perspectives. EMBO Mol Med. 4(10):1015-1028). However, the Fc portion of an antibody homo-dimerizes, which in the case of anti-MUC1* antibody based therapeutics is not optimal since ligand-induced dimerization of the MUC1* receptor stimulates growth. Therefore, mutations in the Fc region that resist dimer formation are preferred for anti-MUC1* anti-cancer therapeutics. Deletion of the hinge region and other mutations in the Fc region that make the Fc-mutant resistant to dimerization were made and could be used as therapeutics.

[0506] A human or humanized MN-E6 antibody or antibody fragment, Fab, MN-E6 scFv or hu MN-E6 scFv-Fcₘᵤₜ are effective anti-cancer agents that can be administered to a person diagnosed with a MUC1 or MUC1* positive cancer, suspected of having a MUC1 or MUC1* positive cancer or is at risk of developing a MUC1 or MUC1* positive cancer.

[0507] Humanizing

[0508] Humanized antibodies or antibody fragments or fully human antibodies that bind to the extracellular domain of -MUC1* are preferred for therapeutic use. The techniques described herein for humanizing antibodies are but a few of a variety of methods known to those skilled in the art. The invention is not meant to be limited by the technique used to humanize the antibody.

[0509] Humanization is the process of replacing the non-human regions of a therapeutic antibody (usually mouse monoclonal antibody) by human one without changing its binding specificity and affinity. The main goal of humanization is to reduce immunogenicity of the therapeutic monoclonal antibody when administered to human. Three distinct types of humanization are possible. First, a chimeric antibody is made by replacing the non-human constant region of the antibody by the human constant region. Such antibody will contain the mouse Fab region and will contain about 80-90% of human sequence. Second, a humanized antibody is made by grafting of the mouse CDR regions (responsible of the binding specificity) onto the variable region of a human antibody, replacing the human CDR (CDR-grafting method). Such antibody will contain about 90-95% of human sequence. Third and last, a full human antibody (100% human sequence) can be created by phage display, where a library of human antibodies is screened to select antigen specific human antibody or by immunizing transgenic mice expressing human antibody.

[0510] A general technique for humanizing an antibody is practiced approximately as follows. Monoclonal antibodies are generated in a host animal, typically in mice. Monoclonal antibodies are then screened for affinity and specificity of binding to the target. Once a monoclonal antibody that has the desired effect and desired characteristics is identified, it is sequenced. The sequence of the animal-generated antibody is then aligned with the sequences of many human antibodies in order to find human antibodies with sequences that are the most homologous to the animal antibody. Biochemistry techniques are employed to paste together the human antibody sequences and the animal antibody sequences. Typically, the non-human CDRs are grafted into the human antibodies that have the highest homology to the non-human antibody. This process can generate many candidate humanized antibodies that need to be tested to identify which antibody or antibodies has the desired affinity and specificity.

[0511] Once a human antibody or a humanized antibody has been generated it can be further modified for use as an Fab fragment, as a full antibody, or as an antibody-like entity such as a single chain molecule containing the variable regions, such as scFv or an scFv-Fc. In some cases it is desirable to have Fc region of the antibody or antibody-like molecule mutated such that it does not dimerize.

[0512] In addition to methods that introduce human sequences into antibodies generated in non-human species, fully human antibodies can be obtained by screening human antibody libraries with a peptide fragment of an antigen. A fully human antibody that functions like MN-E6 or MN-C2 is generated by screening a human antibody library with a peptide having the sequence of the PSMGFR N−10 peptide. Humanized anti-MUC1* antibodies were generated based on the sequences of the mouse monoclonal antibodies MN-E6 and MN-C2. In one aspect of the invention, a patient diagnosed with a MUC1* positive cancer is treated with an effective amount of a murine or camelid MNC2, MNE6, 20A10 (SEQ ID NOS:1574-1581), 3C2B1 (SEQ ID NOS:1572-1573), 5C6F3, 25E6 (SEQ ID NO:1598-1601), 18G12, 28F9, 1E4, B12, B2, B7, B9, 8C7F3, or H11. In another aspect of the invention, a patient diagnosed with a MUC1* positive cancer is treated with an effective amount of humanized MN-E6 or MN-C2. In a preferred embodiment, a patient diagnosed with a MUC1* positive cancer is treated with an effective amount of humanized MNC2, MNE6, 20A10, 3C2B1, 5C6F3, 25E6, 18G12, 28F9, 1E4, B12, B2, B7, B9, 8C7F3, or H11. In another aspect of the invention, a patient diagnosed with a MUC1* positive cancer is treated with an effective amount of humanized monovalent MNC2, MNE6, 20A10 (SEQ ID NOS:1574-1581), 3C2B1, 5C6F3, 25E6, 18G12, 28F9, 1E4, B12, B2, B7, B9, 8C7F3, or H11, wherein monovalent means the corresponding Fab fragment, the corresponding scFv or the corresponding scFv-Fc fusion. In a preferred embodiment, a patient diagnosed with a MUC1* positive cancer is treated with an effective amount of a humanized scFv or monomeric humanized scFv-Fc of MNC2, MNE6, 20A10, 3C2B1, 5C6F3, 25E6, 18G12, 28F9, 1E4, B12, B2, B7, B9, 8C7F3, or H11. Since the MUC1* growth factor receptor is activated by ligand induced dimerization of its extracellular domain, and because the Fc portion of an antibody homo-dimerizes, it is preferable that a construct that includes an Fc portion uses a mutated Fc region that prevents or minimizes dimerization.

[0513] Antibodies that bind to PSMGFR (SEQ ID NO:2) peptide, and more specifically to the N−10 peptide, of the extracellular domain of the MUC1* receptor are potent anti-cancer therapeutics that are effective for the treatment or prevention of MUC1* positive cancers. They have been shown to inhibit the binding of activating ligands dimeric NME1 (SEQ ID NO:1781) and NME7_{AB} (SEQ ID NOS:827) to the extracellular domain of MUC1*. Anti-MUC1* antibodies that bind to the PSMGFR sequence inhibit the growth of MUC1*-positive cancer cells, specifically if they inhibit ligand-induced receptor dimerization. Fabs of anti-MUC1* antibodies have been demonstrated to block tumor growth in animals. Thus, antibodies or antibody fragments that bind to the extracellular domain of MUC1* would be beneficial for the treatment of cancers wherein the cancerous tissues express MUC1*.

[0514] Antibodies that bind to PSMGFR region of MUC1* or bind to a synthetic PSMGFR peptide are preferred. We have identified several monoclonal antibodies that bind to the extracellular domain of MUC1*. Among this group are mouse monoclonal antibodies MNC2 (SEQ ID NOS:118-131, 144-158, 163-164, 168-181, 194-209), MNE6 (SEQ ID NOS:12-25, 39-59, 65-78, 93-114), 20A10 (SEQ ID NOS:988-1019, 1574-1597, 1659-1666); 3C2B1 (SEQ ID NOS:1386-1413, 1572-1573), 5C6F3 (SEQ ID NOS:1356-1385), 25E6 (SEQ ID NOS:1020-1051, 1598-1617, 1667-1674), 18G12 (SEQ ID NOS:956-987), 28F9 (SEQ ID NOS:1052-1083), 1E4 (SEQ ID NOS:1116-1227), B12 (SEQ ID NOS:1414-1431, 1733-1742), B2 (SEQ ID NOS:1432-1459), B7 (SEQ ID NOS:1460-1487), B9 SEQ ID NOS:1544-1571), 8C7F3 (SEQ ID NOS:1488-1515), or H11 (SEQ ID NOS:1516-1543), the variable regions of which were sequenced and are given as for MN-E6 SEQ ID NOS: 12-13 and 65-66, for MN-C2 SEQ ID NOS: 118-119 and 168-169. The CDRs of these antibodies make up the recognition units of the antibodies and are the most important parts of the mouse antibody that should be retained when grafting into a human antibody. The sequences of the CDRs for each mouse monoclonal are as follows, heavy chain sequence followed by light chain: MN-E6 CDR1 (SEQ ID NO:16-17 and 69-70) CDR2 (SEQ ID NO:20-21 and 73-74) CDR3 (SEQ ID NO: 24-25 and 77-78), MN-C2 CDR1 (SEQ ID NO:122-123 and 172-173) CDR2 (SEQ ID NO:126-127 and 176-177) CDR3 (SEQ ID NO:130-131 and 180-181). In some cases, portions of the framework regions that by modeling are thought to be important for the 3-dimensional structure of the CDRs, are also imported from the mouse sequence.

[0515] Monoclonal antibodies MN-E6 and MN-C2 have greater affinity for MUC1* as it appears on cancer cells. Monoclonal antibodies MN-C3 and MN-C8 have greater affinity for MUC1* as it appears on stem cells.

[0516] All four antibodies have been humanized, which process has resulted in several humanized forms of each antibody. CDRs derived from the variable regions of the mouse antibodies were biochemically grafted into a homologous human antibody variable region sequence. Humanized variable regions of MN-E6 (SEQ ID NOS: 38-39 and 93-94), MN-C2 (SEQ ID NOS: 144-145 and 194-195), MN-C3 (SEQ ID NOS: 439-440 and 486-487) and MN-C8 (SEQ ID NOS: 525-526 and 543-544) were generated by grafting the mouse CDRs into the variable region of a homologous human antibody. The humanized heavy chain variable constructs were then fused into constant regions of either human IgG1 heavy chain constant region (SEQ ID NOS:58-59) or human IgG2 heavy chain constant region (SEQ ID NO:54-55), which are then paired with either humanized light chain variable constructs fused to a human kappa chain (SEQ ID NO: 109-110) or human lambda chain (SEQ ID NO: 113-114) constant region. Other IgG isotypes could be used as constant region including IgG3 or IgG4.

[0517] Examples of humanized MN-E6 variable region into an IgG2 heavy chain (SEQ ID NOS:52-53) and into an IgG1 heavy chain (SEQ ID NOS:56-57), humanized MN-C2 variable into an IgG1 heavy chain (SEQ ID NOS: 157-158) or into an IgG2 heavy chain (SEQ ID NOS: 163-164) paired with either Lambda light chain (SEQ ID NO: 111-112 and 216-219) or Kappa chain (SEQ ID NO:107-108 and 210-213) and, humanized MN-C3 (SEQ ID NOS: 455-456, 453-454 and 500-501, 502-503) and MN-C8 (SEQ ID NOS: 541-542, 539-540 and 579-580, 581-582) antibodies were generated. Which IgG constant region is fused to the humanized variable region depends on the desired effect since each isotype has its own characteristic activity. The isotype of the human constant region is selected on the basis of things such as whether antibody dependent cell cytotoxicity (ADCC) or complement dependent cytotoxicity (CDC) is desired but can also depend on the yield of antibody that is generated in cell-based protein expression systems. In a preferred embodiment, humanized anti-MUC1* antibodies or antibody fragments are administered to a person diagnosed with or at risk of developing a MUC1-positive cancer.

[0518] One method for testing and selecting the humanized anti-MUC1* antibodies that would be most useful for the treatment of persons with cancer or at risk of developing cancers is to test them for their ability to inhibit the binding of activating ligands to the MUC1* extracellular domain. Dimeric NME1 can bind to and dimerize the MUC1* extracellular domain and in so doing stimulates cancer cell growth. Antibodies and antibody fragments that compete with NME1 for binding to the MUC1* extracellular domain are therefore anti-cancer agents. NME7_{AB} is another activating ligand of MUC1*. In some cases, it is preferable to identify antibodies that block the binding of NME7, or an NME7_{AB} truncation or cleavage product of NME7-X1, to the MUC1* extracellular domain. Antibodies and antibody fragments that compete with NME7 and NME7 variants for binding to the MUC1* extracellular domain are effective as anti-cancer therapeutics. These antibodies include but are not limited to MNC2, MNE6, 20A10, 3C2B1, 5C6F3, 25E6, 18G12, 28F9, 1E4, B12, B2, B7, B9, 8C7F3, or H11 as well as single chain versions, such as scFv, of these antibodies and humanized version thereof. Other NME proteins also bind to MUC1 or MUC1* including NME6 and NME8. Antibodies that compete with these proteins for binding to MUC1* may also be useful as therapeutics. In a preferred embodiment, murine, camelid, human or humanized anti-MUC1* antibodies or antibody fragments are administered to a person diagnosed with or at risk of developing a MUC1-positive cancer. In a more preferred embodiment, single chain antibody fragments, or monomeric scFv-Fc fusions, derived from humanized sequences of MNC2, MNE6, 20A10, 3C2B1, 5C6F3, 25E6, 18G12, 28F9, 1E4, B12, B2, B7, B9, 8C7F3, or H11 are administered to a person diagnosed with or at risk of developing a MUC1-positive cancer.

[0519] Single chain variable fragments, scFv, or other forms that result in a monovalent antibody or antibody-like protein are also useful. In some cases it is desired to prevent dimerization of the MUC1* extracellular domain. Single chain variable fragments, Fabs and other monovalent antibody-like proteins have been shown to be effective in binding to the extracellular domain of MUC1* and blocking MUC1* dimerization. These single chain variable fragments, Fabs and other monovalent antibody-like molecules effectively blocked cancer growth in vitro and in animals xenografted with human MUC1-positive cancer cells. Thus, humanized single chain variable fragments or monovalent anti-MUC1* antibodies or antibody-like molecules would be very effective as an anti-cancer therapeutic. Such humanized single chain antibodies, Fabs and other monovalent antibody-like molecules that bind to the MUC1* extracellular domain or to a PSMGFR peptide are therefore useful as anti-cancer therapeutics. Anti-MUC1* single chain variable fragments are generated by grafting non-human CDRs of antibodies, which bind to extracellular domain of MUC1* or bind to PSMGFR peptide, into a framework of a homologous variable region human antibody. The resultant humanized heavy and light chain variable regions are then connected to each other via a suitable linker, wherein the linker should be flexible and of length that it allows heavy chain binding to light chain but discourages heavy chain of one molecule binding to the light chain of another. For example a linker of about 10-15 residues. Preferably, the linker includes [(Glycine)₄ (Serine)₁]₃ (SEQ ID NOS: 401-402), but is not limited to this sequence as other sequences are possible.

[0520] In one aspect, the humanized variable regions of MN-E6 (SEQ ID NOS: 38-39 and 93-94), MN-C2 (SEQ ID NOS: 144-145 and 194-195), or other antibodies of the invention are biochemically grafted into a construct that connects heavy and light chains via a linker. Examples of humanized single chain anti-MUC1* antibodies comprising humanized sequences from the variable regions of MN-E6 and MN-C2, were generated. Several humanized MN-E6 single chain proteins were generated (SEQ ID NOS: 232-237). Several humanized MN-C2 single chain proteins were generated (SEQ ID NOS: 238-243). In a preferred embodiment, humanized anti-MUC1* antibody fragments, including variable fragments, scFv antibody fragments MN-E6 scFv, MN-C2 scFv, 20A10, 3C2B1, 5C6F3, 25E6, 18G12, 28F9, 1E4, B12, B2, B7, B9, 8C7F3, or H11 scFv are administered to a person diagnosed with or at risk of developing a MUC1-positive cancer.

[0521] One aspect of the invention is a method for treating a patient diagnosed with, suspected of having, or at risk of developing a MUC1 positive or MUC1* positive cancer, wherein the patient is administered an effective amount of a monomeric MN-E6 scFv, MN-C2 scFv, or MN-E6 scFv-Fc, MN-C2 scFv-Fc, 20A10, 3C2B1, 5C6F3, 25E6, 18G12, 28F9, 1E4, B12, B2, B7, B9, 8C7F3, or H11, wherein the antibody variable fragment portions are human or have been humanized and wherein the Fc portion of the antibody-like protein has been mutated such that it resists dimer formation.

[0522] CAR T and Cancer Immunotherapy Techniques

[0523] In another aspect of the invention, some or all of the single chain portions of anti-MUC1* antibody fragments are biochemically fused onto immune system molecules, using several different chimeric antigen receptor, ‘CAR’ strategies. The idea is to fuse the recognition portion of an antibody, typically as a single chain variable fragment, to an immune system molecule that has a transmembrane domain and a cytoplasmic tail that is able to transmit signals that activate the immune system. The recognition unit can be an antibody fragment, a single chain variable fragment, scFv, or a peptide. In one aspect, the recognition portion of the extracellular domain of the CAR is comprised of sequences from the humanized variable region of MN-E6 (SEQ ID NOS:38-39 and 93-94), MN-C2 (SEQ ID NOS:144-145 and 194-195), 20A10, 3C2B1, 5C6F3, 25E6, 18G12, 28F9, 1E4, B12, B2, B7, B9, 8C7F3, or H11. Examples of murine or humanized antibodies of the invention, or their single chain fragments, scFv's, which can be incorporated into CARs, BiTEs or ADCs are given as: 3C2B1 (SEQ ID NOS: 1572-1573), 20A10 (SEQ ID NOS: 1574-1581), 25E6 (SEQ ID NOS:1598-1601). In another aspect, it is comprised of sequences from a single chain variable fragment. Examples of single chain constructs are given. Several humanized MN-E6 single chain proteins, scFv, were generated (SEQ ID NOS: 232-237). Several humanized MN-C2 single chain proteins, scFv, were generated (SEQ ID NOS: 238-243). The transmembrane region of the CAR can be derived from CD8, CD4, antibody domains or other transmembrane region, including the transmembrane region of the proximal cytoplasmic co-stimulatory domain, such as CD28, 4-1BB or other. The cytoplasmic tail of the CAR can be comprised of one or more motifs that signal immune system activation. This group of cytoplasmic signaling motifs, sometimes referred to as, co-stimulatory cytoplasmic domains, includes but is not limited to CD3-zeta, CD27, CD28, 4-1BB, OX40, CD30, CD40, ICAm-1, LFA-1, ICOS, CD2, CD5, CD7 and Fc receptor gamma domain. A minimal CAR may have the CD3-zeta or an Fc receptor gamma domain then one or two of the above domains in tandem on the cytoplasmic tail. In one aspect, the cytoplasmic tail comprises CD3-zeta, CD28, 4-1BB and/or OX40.

[0524] The extracellular domain recognition unit of a MUC1* targeting CAR can comprise variable regions of any non-human, humanized or human antibody that is able to bind to at least 12 contiguous amino acids of the PSMGFR peptide (SEQ ID NO:2) or the N−10 peptide. In one aspect, the MUC1* targeting portion of the CAR comprises variable regions from non-human, humanized or human MNC2, MNE6, 20A10, 3C2B1, 5C6F3, 25E6, 18G12, 28F9, 1E4, B12, B2, B7, B9, 8C7F3, or H11. Examples of a few antibodies of the invention, incorporated into CARs as either murine or humanized are given as 20A10 (SEQ ID NOS:1582-1597) and 25E6 (SEQ ID NOS:1602-1617). In the humanization process, the antibody CDRs can be inserted into a number of different framework regions; as a demonstration we generated three versions of a humanized 20A10 which differ only in the framework regions. These have been incorporated into CARs (SEQ ID NOS:1675, 1678, 1685) that when transduced into human T cells are able to recognize target MUC1* expressing cells and kill them. In one aspect, the extracellular domain recognition unit of a CAR is comprised essentially of a humanized MNC2, MNE6, 20A10, 3C2B1, 5C6F3, 25E6, 18G12, 28F9, 1E4, B12, B2, B7, B9, 8C7F3, or H11 single chain variable fragment scFv. The transmembrane region of the CAR can be derived from CD8 (SEQ ID NOS:363-364), or can be the transmembrane domain of CD3-zeta, CD28, 41bb, OX40 or other transmembrane region (SEQ ID NOS:361-372) and the cytoplasmic domain of a CAR with antibody fragment targeting MUC1* extracellular domain can be comprised of one or more selected from the group comprising an immune system co-stimulatory cytoplasmic domain. The group of immune system co-stimulatory domains includes but is not limited to CD3-zeta, CD27, CD28, 4-1BB, OX40, CD30, CD40, ICAm-1, LFA-1, ICOS, CD2, CD5, CD7 and Fc receptor gamma domain (SEQ ID NOS:373-382).

[0525] The CARs described can be transfected or transduced into a cell of the immune system. In a preferred embodiment, a MUC1* targeting CAR is transfected or transduced into a T cell. In one aspect, the T cell is a CD3+/CD28+ T cell. In another case it is a dendritic cell. In another case it is a B cell. In another case it is a mast cell. In yet another case it is a Natural Killer, NK, cell. The recipient cell can be from a patient or from a donor. If from a donor, it can be engineered to remove molecules that would trigger rejection. Cells transfected or transduced with a CAR of the invention can be expanded ex vivo or in vitro then administered to a patient. Administrative routes are chosen from a group containing but not limited to bone marrow transplant, intravenous injection, in situ injection or transplant. In a preferred embodiment, the MUC1* targeting CAR is administered to a person diagnosed with or at risk of developing a MUC1-positive cancer.

[0526] There are many possible anti-MUC1* CAR constructs that can be transduced into T cells or other immune cells for the treatment or prevention of MUC1* positive cancers. CARs are made up of modules and the identity of some of the modules is relatively unimportant, while the identity of other modules is critically important.

[0527] We and others have shown that intracellular signaling modules, such as CD3-zeta (SEQ ID NOS: 373-376), CD28 (SEQ ID NOS: 377-378) and 41BB (SEQ ID NOS: 379-380), alone or in combinations stimulate immune cell expansion, cytokine secretion and immune cell mediated killing of the targeted tumor cells (Pule M A, Straathof K C, Dotti G, Heslop H E, Rooney C M and Brenner M K (2005) A chimeric T cell antigen receptor that augments cytokine release and supports clonal expansion of primary human T cells. Mol Ther. 12(5):933-941; Hombach A A, Heiders J, Foppe M, Chmielewski M and Abken H. (2012) OX40 costimulation by a chimeric antigen receptor abrogates CD28 and IL-2 induced IL-10 secretion by redirected CD4(+) T cells. Oncoimmunology. 1(4):458-466; Kowolik C M, Topp M S, Gonzalez S, Pfeiffer T, Olivares S, Gonzalez N, Smith D D, Forman S J, Jensen M C and Cooper U. (2006) CD28 costimulation provided through a CD19-specific chimeric antigen receptor enhances in vivo persistence and antitumor efficacy of adoptively transferred T cells. Cancer Res. 66(22):10995-11004; Loskog A, Giandomenico V, Rossig C, Pule M, Dotti G and Brenner M K. (2006) Addition of the CD28 signaling domain to chimeric T-cell receptors enhances chimeric T-cell resistance to T regulatory cells. Leukemia. 20(10):1819-1828; Milone MC, Fish J D, Carpenito C, Carroll R G, Binder G K, Teachey D, Samanta M, Lakhal M, Gloss B, Danet-Desnoyers G, Campana D, Riley J L, Grupp S A and June C H. (2009) Chimeric receptors containing CD137 signal transduction domains mediate enhanced survival of T cells and increased antileukemic efficacy in vivo. Mol Ther. 17(8):1453-1464; Song D G, Ye Q, Carpenito C, Poussin M, Wang L P, Ji C, Figini M, June C H, Coukos G, Powell D J Jr. (2011) In vivo persistence, tumor localization, and antitumor activity of CAR-engineered T cells is enhanced by costimulatory signaling through CD137 (4-1BB). Cancer Res. 71(13):4617-4627). Antibodies of the invention including but not limited to fragments of MNC2, MNE6, 20A10, 3C2B1, 5C6F3, 25E6, 18G12, 28F9, 1E4, B12, B2, B7, B9, 8C7F3, or H11 can also be incorporated into CARs that have mutated cytoplasmic tails, such as mutated tyrosines or ITAMs. In any of the CARs described above, the cytoplasmic tails may include mutations that dampen signaling. Such mutations include but are not limited to Tyrosines that are mutated to inhibit phosphorylation and signaling (Salter et al, 2018). In any of the CARs described above, the ITAMs of CD3-zeta may be mutated to inhibit or dampen signaling (Feucht et al 2019). In any of the CARs described above, the CD3 of the cytoplasmic tail may comprise mutations in the ITAMs including those referred to as 1XX. Examples of antibodies of the invention incorporated into CARs with 1XX mutations in ITAMs of CD3-zeta are given in the following sequences: MNC2 (SEQ ID NOS: 1618-1625), MNE6 (SEQ ID NOS:1626-1633), 20A10 (SEQ ID NOS:1590-1595), 25E6 (SEQ ID NOS:1610-1617). We note that the CDRs of antibodies can be inserted into a background of a number of different framework regions. As an example, 20A10 CDRs were inserted into three different sets of framework regions (SEQ ID NOS:1692, 1699 and 1706) and all were able to function when transduced into T cells. In any of the CARs described above, the T cell may be engineered to overexpress c-Jun as a method to inhibit T cell exhaustion (Lynn et al 2019). A variety of promoters can be used upstream of the genes for CARs and other compositions of the invention, including insertion into a naturally occurring promoter in the cell, such as the TRAC locus, using CRISPR, Sleeping Beauty or similar technology for site directed insertion of a gene. Among the promoters commonly used are the CMV promoter, or a mini CMV (SEQ ID NO: 1634), a minimal IL-2 promoter (SEQ ID NO: 1635), or Minimal Promoter minip (SEQ ID NO: 1636).

[0528] Single chain antibody fragments that included the variable domain of the monoclonal anti-MUC1* antibodies called MN-E6 or MN-C2 were engineered into a panel of CARs. The MUC1* targeting CARs were then transduced, separately or in combinations, into immune cells. When challenged with surfaces presenting a MUC1* peptide, an antigen presenting cell transfected with MUC1*, or MUC1* positive cancer cells, the immune cells that were transduced with MUC1* targeting CARs elicited immune responses, including cytokine release, killing of the targeted cells and expansion of the immune cells.

[0529] For example, the gene encoding the CARs and activated T cell induced genes described herein can be virally transduced into an immune cell using viruses, or inserted into a region downstream of one of the cell's promoters or enhancers, such as the TRAC (T cell receptor alpha chain) locus. Virus delivery systems and viral vectors including but not limited to retroviruses, including gamma-retroviruses, lentivirus, adenoviruses, adeno-associated viruses, baculoviruses, poxvirus, herpes simplex viruses, oncolytic viruses, HF10, T-Vec and the like can be used. In addition to viral transduction, CARs and activated T cell induced genes described herein can be directly spliced into the genome of the recipient cell using methods such as CRISPR technology, CRISPR-Cas9 and -CPF1, TALEN, Sleeping Beauty transposon system, and SB 100×.

[0530] Similarly, the identity of molecules that make up the non-targeting portions of the CAR such as the extracellular domain, transmembrane domain and membrane proximal portion of the cytoplasmic domain, are not essential to the function of a MUC1*-targeting CAR. For example, the extracellular domain, transmembrane domain and membrane proximal portion of the cytoplasmic domain can be comprised of portions of CD8, CD4, CD28, or generic antibody domains such as Fc, CH2CH3, or CH3. Further, the non-targeting portions of a CAR can be a composite of portions of one or more of these molecules or other family members.

[0531] One aspect of the invention is a method for treating a patient diagnosed with, suspected of having, or at risk of developing a MUC1 positive or MUC1* positive cancer, wherein the patient is administered an effective amount of immune cells that have been transduced with a MUC1* targeting CAR. In another aspect of the invention, the immune cells are T cells isolated from a patient, which are then transduced with CARs wherein the targeting head of the CAR binds to MUC1*, and after expansion of transduced T cells, the CAR T cells are administered in an effective amount to the patient. In yet another aspect of the invention, the immune cells are T cells isolated from a patient, which are then transduced with CARs wherein the targeting head of the CAR comprises portions of MNC2, MNE6, 20A10, 3C2B1, 5C6F3, 25E6, 18G12, 28F9, 1E4, B12, B2, B7, B9, 8C7F3, or H11, and after optional expansion of transduced T cells, the CAR T cells are administered in an effective amount to the patient.

[0532] Specificity of Anti-MUC1* Targeting Antibodies

[0533] As these experiments demonstrate, the critical portion of a CAR is the antibody fragment that directs the immune cell to the tumor cell. As we will show in the following section, MN-E6 and MN-C2 are specific for the form of MUC1* that is expressed on tumor cells. The next most important part of a CAR is the cytoplasmic tail bearing immune system co-stimulatory domains. The identity of these domains modulates the degree of immune response but does not affect the specificity. As shown, the identity of the transmembrane portion of a CAR is the least important. It appears that as long as the transmembrane portion has some flexibility and is long enough to allow the antibody fragment to reach its cognate receptor on the tumor cell, it will suffice. CARs comprising the MN-E6 targeting antibody fragment, and intracellular co-stimulatory domains 41BB and CD3-zeta but having a variety of different extracellular, transmembrane and short cytoplasmic tail all worked in that they specifically killed the targeted cells while stimulating the expansion of the host T cells.

[0534] The most accurate way of demonstrating antibody specificity is testing the antibody on normal human tissue specimens compared to cancerous tissue specimens. MN-C2 and MN-E6 were shown to specifically bind to MUC1 or MUC1* positive cancer cells. Several breast tumor arrays were assayed using several anti-MUC1 or MUC1* antibodies. Essentially the studies involving serial sections of breast cancer tissue specimens from over 1,200 different breast cancer patients showed that very little full-length MUC1 remains on breast cancer tissues. The vast majority of the MUC1 expressed is MUC1* and is stained by MN-C2. The analysis was performed by Clarient Diagnostics and tissue staining was scored using the Allred method. For example, FIG. 10 shows serial sections of breast cancer tissue arrays that were stained with either VU4H5, a commercially available anti-MUC1 antibody that binds to the tandem repeats, or MN-C2 that binds to MUC1*. FIGS. 10 and 11 are photographs of breast cancer tissue arrays stained with either VU4H5 which recognizes MUC1-FL (full length) or MN-C2 which recognizes cancerous MUC1*. Tissue staining was scored using Allred scoring method which combines an intensity score and a distribution score. Below the photographs of the tissue arrays are color-coded graphs displaying the results. As can be seen, the arrays stained with VU4H5 are very light and many tissues do not stain at all despite the published reports that MUC1 is aberrantly expressed on over 96% of all breast cancers as evidenced by nucleic acid based diagnostics. In contrast, the arrays stained with MN-C2 are very dark (red versus yellow or white in graph). Additionally, many tissues did not stain at all with anti-full-length MUC1 but stained very dark with MN-C2, (see green boxes in graph). Similarly, we stained normal or cancerous breast tissues with humanized MN-E6 scFv-Fc. The antibody fragment was biotinylated so it could be visualized by a secondary streptavidin based secondary. As can be seen in FIG. 12, hMN-E6 scFv-Fc does not stain normal breast tissue but stains cancerous breast tissue. Further, the intensity and homogeneity of staining increases with tumor grade and/or metastatic grade of the patient (FIG. 12-13). Similarly, hMN-E6 scFv-Fc did not stain normal lung tissue but did stain lung cancer tissue (FIG. 14-18) and the intensity and distribution of staining increased as tumor grade or metastatic grade increased. FIG. 19 shows photographs of normal small intestine and cancerous small intestine tissues stained with humanized MN-E6-scFv-Fc biotinylated anti-MUC1* antibody at 5 ug/mL, then stained with a secondary streptavidin HRP antibody. A) is a normal small intestine tissue. B) is small intestine cancer from patient as denoted in the figure. C,D are photographs of the corresponding serial sections that were stained with the secondary antibody alone. FIG. 20 shows photographs of normal small intestine tissues stained with humanized MN-E6-scFv-Fc anti-MUC1* antibody at 50 ug/mL, then stained with a secondary goat-anti-human HRP antibody. A-D are normal small intestine tissue. E-H are photographs of the corresponding serial sections that were stained with the secondary antibody alone. FIG. 21 shows photographs of cancerous small intestine tissues stained with humanized MN-E6-scFv-Fc anti-MUC1* antibody at 50 ug/mL, then stained with a secondary goat-anti-human HRP antibody. A-D are cancerous small intestine tissue from a patient as denoted in figure. E-H are photographs of the corresponding serial sections that were stained with the secondary antibody alone. FIG. 22 shows photographs of cancerous small intestine tissues stained with humanized MN-E6-scFv-Fc anti-MUC1* antibody at 50 ug/mL, then stained with a secondary goat-anti-human HRP antibody. A-D are cancerous small intestine tissue from a patient as denoted in figure. E-H are photographs of the corresponding serial sections that were stained with the secondary antibody alone. FIG. 23 shows photographs of normal colon tissues stained with humanized MN-E6-scFv-Fc anti-MUC1* antibody at 50 ug/mL, then stained with a secondary goat-anti-human HRP antibody. A-D are normal colon. E-H are photographs of the corresponding serial sections that were stained with the secondary antibody alone. FIG. 24 shows photographs of colon cancer tissues stained with humanized MN-E6-scFv-Fc anti-MUC1* antibody at 50 ug/mL, then stained with a secondary goat-anti-human HRP antibody. A-D are colon cancer tissue from a metastatic patient as denoted in figure. E-H are photographs of the corresponding serial sections that were stained with the secondary antibody alone. FIG. 25 shows photographs of colon cancer tissues stained with humanized MN-E6-scFv-Fc anti-MUC1* antibody at 50 ug/mL, then stained with a secondary goat-anti-human HRP antibody. A-D are colon cancer tissue from a Grade 2 patient as denoted in figure. E-H are photographs of the corresponding serial sections that were stained with the secondary antibody alone. FIG. 26 shows photographs of colon cancer tissues stained with humanized MN-E6-scFv-Fc anti-MUC1* antibody at 50 ug/mL, then stained with a secondary goat-anti-human HRP antibody. A-D are colon cancer tissue from a metastatic patient as denoted in figure. E-H are photographs of the corresponding serial sections that were stained with the secondary antibody alone. FIG. 27 shows photographs of prostate cancer tissues stained with humanized MN-E6-scFv-Fc anti-MUC1* antibody at 50 ug/mL, then stained with a secondary goat-anti-human HRP antibody. A-D are prostate cancer tissue from a patient as denoted in figure. E-H are photographs of the corresponding serial sections that were stained with the secondary antibody alone. FIG. 28 shows photographs of prostate cancer tissues stained with humanized MN-E6-scFv-Fc anti-MUC1* antibody at 50 ug/mL, then stained with a secondary goat-anti-human HRP antibody. A-D are prostate cancer tissue from a patient as denoted in figure. E-H are photographs of the corresponding serial sections that were stained with the secondary antibody alone. FIG. 29 shows photographs of prostate cancer tissues stained with humanized MN-E6-scFv-Fc anti-MUC1* antibody at 50 ug/mL, then stained with a secondary goat-anti-human HRP antibody. A-D are prostate cancer tissue from a patient as denoted in figure. E-H are photographs of the corresponding serial sections that were stained with the secondary antibody alone.

[0535] One aspect of the invention is a method for treating a patient diagnosed with, suspected of having, or at risk of developing a MUC1 positive or MUC1* positive cancer, wherein a specimen is obtained from the patient's cancer and is tested for reactivity with an antibody that binds to PSMGFR SEQ ID NO:2, or more specifically to the N−10 peptide. The patient is then treated with an scFv, scFv-Fc or CAR T that comprises antibody variable fragments from the antibody that reacted with their cancer specimen or can be chosen from among MNC2, MNE6, 20A10, 3C2B1, 5C6F3, 25E6, 18G12, 28F9, 1E4, B12, B2, B7, B9, 8C7F3, or H11. Another aspect of the invention is a method for treating a patient diagnosed with, suspected of having, or at risk of developing a MUC1 positive or MUC1* positive cancer, wherein a specimen is obtained from the patient's cancer and is tested for reactivity with MNC2, MNE6, 20A10, 3C2B1, 5C6F3, 25E6, 18G12, 28F9, 1E4, B12, B2, B7, B9, 8C7F3, or H11; the patient is then treated with the antibody, antibody fragment, scFv, scFv-Fc-mut, BiTE or CAR T that comprises portions of the antibody that reacted with their cancer specimen.

[0536] As we previously reported, it is MUC1*, the transmembrane cleavage product, not full-length MUC1, the is a growth factor receptor that drives tumor growth. The growth factors that activate MUC1* bind to ectopic sites that are only exposed after cleavage and release of the tandem repeat portion of MUC1. Antibodies of the invention, like the activating growth factors, cannot bind to full-length MUC1. FACS analysis clearly shows that anti-MUC1* antibody MNC2 is unable to bind to HCT-116, MUC1 negative cells (FIG. 35A), binds robustly to those cells if they are transfected with MUC1* (FIG. 35B), but will not bind to HCT cells transfected with full-length MUC1 (FIG. 35C). A commercially available anti-tandem repeat antibody VU4H5 clearly recognizes full-length MUC1 (FIG. 35D).

[0537] We discovered that MUC1 can be cleaved to MUC1* by more than one cleavage enzyme and that the site of cleavage affects its fold and consequently affects which monoclonal antibody is able to recognize that form of MUC1*. Different cancer cells or cancerous tissues express different cleavage enzymes. We tested various cleavage enzyme inhibitors on different cancer cell lines and found that an inhibitor that inhibits cleavage of MUC1 in one cancer cell line did not inhibit its cleavage in another cancer cell line. Similarly, PCR experiments showed that cleavage enzymes are expressed at different levels in different cells or cell lines. For example, hematopoietic stem cells of the bone marrow express a MUC1* that is recognized by monoclonal antibody MNC3 but not MNE6 or MNC2 (FIG. 39). The growth of DU145 prostate cancer cells and T47D breast cancer cells is inhibited by the Fabs of MNC2 and MNE6 but not by the Fabs of MNC3 or MNC8, indicating that the cancer cell lines express a MUC1* that is recognized by MNE6 and MNC2 but not by MNC3 or MNC8 (FIG. 42). PCR experiments show that CD34 positive cells of the bone marrow express about 2,500-times more MMP2 and about 350-times more ADAM28 than T47D breast cancer cells, while DU145 prostate cancer cells express about 2,000-times more ADAM TS16, about 400-times more MMP14 and about 100-times more MMP1 than T47D breast cancer cells (FIG. 43 and FIG. 44). Conversely, T47D breast cancer cells express about 80-times more MMP9 than the bone marrow cells and about twice as much as DU145 prostate cancer cells. Various cleavage enzyme inhibitors were tested for their ability to inhibit cleavage in different kinds of cancer cells.

[0538] General Strategy for Using Antibodies, Antibody Fragments and CARs that Target the Extracellular Domain of MUC1*

[0539] In one aspect of the invention, a second factor, which may be a cleavage enzyme, an antibody, a cytokine, or a second CAR, and a CAR are transduced into the same T cell. In another aspect of the invention, the second factor is on an inducible promoter such that its expression is activated when the CAR engages the targeted cancer cells. In some cases, the expression of the second factor is controlled by an inducible promoter. In one aspect of the invention, expression of the second factor is induced when the immune cell is activated, for example when it recognizes or engages its target. In one example, a T cell is transfected or transduced with a second factor whose expression is induced when the T cell recognizes a target cancer cell. One way to do this is to induce expression of the second factor when, or shortly after, an NFAT protein is expressed or translocated to the nucleus. For example, a sequence derived from an NFAT promoter region is put upstream of the gene for the second factor. In this way, when the transcription factors that bind to the promoter of the NFAT protein are present in sufficient concentration to bind to and induce transcription of the NFAT protein, they will also bind to that same promoter that is engineered in front of the sequence for transcription of the second factor. The NFAT protein may be NFAT1 also known as NFATc2, NFAT2 also known as NFATc or NFATc1, NFAT3 also known as NFATc4, NFAT4 also known as NFATc3, or NFAT5. In one aspect of the invention, the NFAT is NFATc1, NFATc3 or NFATc2. In one aspect of the invention, the NFAT is NFAT2 also known as NFATc1. SEQ ID NO:646 shows nucleic acid sequence of the upstream transcriptional regulatory region for NFAT2. The promoter sequence for NFAT gene may include the nucleic acid sequence of SEQ ID NO:781-783 or SEQ ID NO:815 as examples, but it can be seen that the optimal sequence or minimal sequence for expression of the second factor may be obtained by making fragments, extensions or mutations of the promoter and testing for the strength of the promoter with respect to expression of the second factor. In one aspect of the invention, the transcriptional regulatory region for NFAT2 is engineered upstream of the gene encoding the second factor, which if for cleavage enzyme MMP9 (SEQ ID NO:647) or the catalytic sub-unit of MMP9 (SEQ ID NO:648). In one aspect of the invention, the NFAT is NFATc3 and the promoter sequence of NFATc3 includes nucleic acid sequences from SEQ ID NO:816. In one aspect of the invention, the transcriptional regulatory region for NFATc3 is engineered upstream of the gene encoding the second factor, here as an example is MMP9. In another aspect of the invention, the NFAT is NFATc2. SEQ ID NO:817-818 shows nucleic acid sequence of the upstream transcriptional regulatory region for NFATc2. In one aspect of the invention, the transcriptional regulatory region for NFATc2 is engineered upstream of the gene encoding the second factor, which may be cleavage enzyme MMP9 (SEQ ID NO:647) or the catalytic sub-unit of MMP9 (SEQ ID NO:648).

[0540] Another method for having the expression of the second factor induced when the T cell or CAR T cell is activated is to have the gene for the second factor on an inducible promoter where the NFAT protein itself binds to and induces transcription of the second factor. In this case, an NFAT response element (NFAT RE) may be positioned upstream of the gene for the second factor or fragment of the second factor. The NFAT may bind to its responsive element upstream of the second factor alone or as part of a complex. The NFAT protein may be NFATc1, NFATc2, NFATc3, NFATc4, or NFAT5. In a preferred embodiment, the NFAT protein is NFAT2 aka NFATc1, aka NFATc. The gene of the second factor or fragment thereof is cloned downstream of an NFAT-response element (SEQ ID NO:649), which may be repeats of the response element (SEQ ID NO:650) and CMV minimal promoter (mCMV) (SEQ ID NO:651) to induce expression of second factor by NFAT protein. The NFAT response element may include nucleic acid sequence of NFAT consensus sequence (SEQ ID NO:804). The NFAT response element may include the nucleic acid sequence of SEQ ID NOS:805-814 as examples, but it can be seen that the optimal sequence or minimal sequence for expression of the second factor may be obtained by making fragments, extensions or mutations of the responsive element nucleic acid and testing for the strength of the responsive element with respect to expression of the second factor. The enhancer region of Foxp3 also contains NFAT response elements within the 120-bp from 2079 to 2098 (SEQ ID NO:821). The NFAT response element may include nucleic acid NFAT consensus sequence of (5′-cattttttccat-3′) (SEQ ID NO:819) or (5′-tttttcca-3′) (SEQ ID NO:820), which NFATc1 specifically binds to (Xu et al., Closely related T-memory stem cells correlate with in vivo expansion of CAR. CD19-T cells and are preserved by IL-7 and IL-15, Blood 2014 123:3750-3759), or repeats thereof. The NFAT response elements may also be separated by nucleic acid spacer sequences. Other NFAT responsive elements may exist and may further be discovered, and a skilled artisan in the art when directed to determine NFAT responsive element may do so by carrying out molecular biological assays to obtain it given the guidance of at least the responsive elements as set forth as SEQ ID NOS: 804-814 albeit as only mere examples. In one aspect of the invention, the cleavage enzyme that is downstream of the NFAT-response element and CMV minimal promoter is MMP9 (SEQ ID NO:652). In another aspect of the invention, the cleavage enzyme is a catalytic sub-unit of MMP9 (SEQ ID NO:653).

[0541] Because NFATs 1-4 are regulated by the calcineurin pathway, potential toxicities that may arise in a patient can be stopped by treatment with an immunosuppressive agent such as FK506, Cyclosporin, Cyclosporin A, or Tacrolimus that block calcineurin activity and inhibit NFAT translocation to the nucleus. The T cell transduced or transfected with a cleavage enzyme on an inducible promoter may also be transfected or transduced with a CAR that recognizes a protein or molecule on the cancer cell. In a specific example, the cleavage enzyme is one that is able to cleave MUC1 full-length and the CAR bears an antibody fragment that directs it to MUC1* on the surface of cancer cells.

[0542] To determine which cleavage enzymes cleave MUC1 on cancer cells, we tested a series of MMP and ADAM enzyme inhibitors. These experiments pointed to MMP9 as being an important cleavage enzyme in cancer cells. To confirm that MMP9 cleaves MUC1 on cancer cells, we transfected HCT-116 MUC1 negative colon cancer cells with a mimic of full-length MUC1 having 41 tandem repeat domains: HCT-MUC1-41TR. Through single cell cloning we were able to establish this cell line wherein MUC1 only minimally gets cleaved to MUC1*. FIGS. 36A-36D show Western blots and FACS analysis showing that HCT-MUC1-41TR is 95% positive for full-length MUC1 and only 5-10% positive for the cleaved form, MUC1*. HCT-MUC1-41TR cells were incubated with MMP9 at varying concentrations and then assayed by immunofluorescence to measure binding of MNC2 monoclonal antibody to the resultant cells. As can be seen in FIGS. 37A-37C binding of MNC2 increased as the concentration of MMP9 added to the cells increased. These experiments show that MMP9 cleaves MUC1 to a form that is recognized by MNC2. The human cancer tissue array studies we performed (FIG. 30A-30F, FIG. 31A-31F, FIG. 32A-32F, FIG. 33A-33F) show that MNC2 recognizes the form of cleaved MUC1 that is present on cancerous tissue but not on healthy cells or tissues (FIG. 34A-34I). Importantly, MNC2 does not recognize the form of cleaved MUC1 that is expressed on healthy hematopoietic stem cells of the bone marrow (FIGS. 39-41).

[0543] In one aspect of the invention, an immune cell is transduced with both a CAR to target the immune cell to the tumor, and a cleavage enzyme. The CAR and the cleavage enzyme can be encoded on the same plasmid or on two different plasmids. In one aspect, the cleavage enzyme is on an inducible promoter. In another aspect, expression of the cleavage enzyme is induced by a protein that is expressed when the immune cell is activated. In one case, expression of the cleavage enzyme is induced by an NFAT protein. In another aspect, expression of the cleavage enzyme is induced by NFATc1. In another aspect, expression of the cleavage enzyme is induced when one of the NFAT proteins binds to an NFAT response element that is inserted upstream of the gene for the cleavage enzyme or a catalytically active fragment thereof. In one aspect, the cleavage enzyme is MMP9 or a fragment of MMP9 that is catalytically active.

[0544] In one aspect of the invention, the cleavage enzyme is MMP9 (SEQ ID NO:643). Some cleavage enzymes are naturally expressed as pro-enzymes that need to be activated. This can be accomplished by biochemical means, by expressing a co-enzyme that activates a cleavage enzyme or by engineering the enzyme in an activated form. The invention anticipates overcoming this problem by co-expressing the cleavage enzyme with its activator. In one aspect of the invention, the cleavage enzyme is MMP9 and the co-activator is MMP3. In another aspect of the invention, the cleavage enzyme is expressed in a form that is already active, for example by expressing a fragment of the cleavage enzyme that still has catalytic function. In one case, the cleavage enzyme is an MMP9 fragment that is catalytically active. One example of an MMP9 catalytic fragment is given as SEQ ID NO:645.

[0545] MMP9, which must be activated by MMP3, is overexpressed in a large percentage of solid tumors. Further, it is known that MNC2 anti-MUC1* monoclonal antibody recognizes MUC1 after it is cleaved by MMP9. The various breast, ovarian, pancreatic and lung cancer tissue arrays that were shown in FIGS. 30-33 were probed with MNC2-scFv, further indicating that MUC1 in these cancers is being cleaved by MMP9. To see if cleavage of tumors by MMP9 would increase T cell access to the tumor, we did a series of experiments using a cell line that expresses full-length MUC1, HCT-MUC1-41TR, a breast cancer cell line that is a high expresser of both full-length MUC1 and MUC1* and a MUC1 negative cell line that we transfect with MUC1*45. We transfected cells with MMP9 and MMP3, which activates MMP9. We took the supernatant of those cells, which contained activated MMP9, and added it to the various cells, which were then co-cultured with T cells transduced with an anti-MUC1* CAR: huMNC2-CAR44. The result was greatly increased CAR T cell killing of the targeted MUC1/MUC1* positive cancer cells, compared to the control cells that were not incubated with a MUC1 cleavage enzyme.

[0546] APMA is a biochemical that activates MMPs. We used APMA along with the conditioned media of cells that we transfected with either MMP9 or ADAM17 to see if any of these cleavage enzymes would cleave MUC1 on the HCT-MUC1-41TR cell line that only expresses full-length MUC1. As controls, we also tested the enzymes on HCT-MUC1* cells. The MUC1 and MUC1* expressing cells were stained with a red dye, CMTMR. Human T cells that were transduced with an anti-MUC1* CARs, CAR44 or CAR50 were co-cultured with the cancer cells. Untransduced T cells were used as a control (FIG. 45A-45P). As can be seen in FIG. 45B, FIG. 45C, and FIG. 45D, the anti-MUC1* CAR T cells effectively recognized and clustered the HCT-MUC1* cancer cells, which is a sign of T cell activation and killing. However, no CAR T cell induced clustering is visible in the wells containing HCT-MUC1-41TR, the full-length MUC1 expressing cells (FIG. 45F, FIG. 45G, and FIG. 45H). However, the cells that were incubated with activated MMP9 show dramatic increase in CAR T cell induced clustering (FIG. 45J, FIG. 45K, and FIG. 45L), indicating that MMP9 cleaved the full-length MUC1 to a form of MUC1* that is recognized by MNC2 monoclonal antibody and more specifically by huMNC2-scFv. ADAM17 had no apparent effect. ADAM17 either did not cleave MUC1 or cleaved it at a position that is not recognized by MNC2, which is more likely (FIG. 45N-45P).

[0547] We performed the same experiment, this time using T47D breast cancer cells that were hard to kill using anti-MUC1* CAR T cells presumably because they express high levels of full-length MUC1 as well as MUC1* (FIG. 46A-46T). As can be seen in FIGS. 46B, 46C, and 46D, anti-MUC1* CAR44 and CAR50 have little effect on the T47D cancer cells. Only in FIG. 46D, which is CAR44 at the highest level of CAR expression in the T cells, do we see a small amount of CAR T cell induced clustering. However, the presence of activated MMP2 (FIG. 46J, 46K, 46L) or activated MMP9 (FIG. 46R, 46S, 46T) shows a dramatic increase in CAR T cell recognition, clustering and killing, showing that cleavage of full-length MUC1 increases T cell access to the cancer cells. To ensure that the addition of the APMA was not inducing cleavage or anti-MUC1* CAR T recognition by some other mechanism, we made a catalytically active form of MMP9 and added it to T47D cells that were then co-cultured with MNC2-CAR44 T cells (FIG. 47A-47I). As can be seen in the figure, MNC2-CAR T cells recognize and cluster cells transfected with MUC1* (FIG. 47B-47C), poorly cluster T47D breast cancer cells that express both full-length MUC1 and MUC1* (FIG. 47E-47F), but robustly bind to and cluster the T47D cells after the addition of the catalytically active MMP9 (FIG. 47H-47I). This results supports the claim that MNC2 does not recognize full-length MUC1 but does recognize the growth factor receptor MUC1*. Note that the full-length IMUC1 expressed on this cell line may sterically hinder the binding of CAR T cells near the cell membrane.

[0548] In another example, T47D MUC1 positive tumor cells were incubated with a recombinant catalytic domain of MMP9 (Enzo Life Sciences, Inc., Farmingdale, N.Y.) at either 100 ng/mL or 500 ng/mL. Western blot analysis showed that the MUC1/MUC1* positive cancer cells underwent extensive cleavage of MUC1 to MUC1*. In another example, T47D breast cancer cells were pre-incubated with a human recombinant MMP9 catalytic domain protein then co-cultured with anti-MUC1* CAR44 T cells. The specific killing of the T47D cells by CAR44 T cells was monitored in real-time on an xCelligence instrument that measures impedance as a function of time. This analysis uses electrode arrays upon which cancer cells are plated. The adherent cancer cells insulate the electrode and cause an increase in impedance as they grow. Conversely, T cells are not adherent and remain in suspension so do not increase or decrease impedance. However, if the T cells or CAR T cells kill the cancer cells on the electrode plate, the cancer cells ball up and float as they die, which causes the impedance to decrease. The addition of MMP9 catalytic domain dramatically increased the killing of T47D cancer cells. FIG. 48 shows an xCelligence graph of T47D breast cancer cells in co-culture with either untransduced T cells, as a control, or huMNC2-CAR44 T cells over a 45 hour period. After 18 hours of cancer cell growth, a catalytic sub-unit MMP9 was added to some of the cells. At 25 hours, T cells were added. As can be seen, huMNC2-CAR44 T cell killing is greatly improved when the T47D cells are pre-incubated with cleavage enzyme MMP9. In the xCelligence system, target cancer cells, which are adherent, are plated onto electrode array plates. Adherent cells insulate the electrode and increase the impedance. The number of adherent cancer cells is directly proportional to impedance. T cells are not adherent and do not contribute to impedance. Therefore, increasing impedance reflects growth of cancer cells and decreasing impedance reflects killing of cancer cells. Prostate cancer cell line DU145 expresses both MUC1 and MUC1* but at a much lower level of expression than T47D cells. DU145 cells are efficiently killed by anti-MUC1* CAR T cells in the presence or absence of a cleavage enzyme.

[0549] FIG. 49 shows an xCelligence graph of DU145 prostate cancer cells in co-culture with either untransduced T cells, as a control, or huMNC2-CAR44 T cells over a 45 hour period. After 18 hours of cancer cell growth, a catalytic sub-unit MMP9 was added to some of the cells. At 25 hours, T cells were added. As can be seen, huMNC2-CAR44 T cell killing of low density MUC1/MUC1* positive cancer cells is not affected by pre-incubation with cleavage enzyme MMP9. DU145 cancer cells express a significantly lower amount of MUC1 which includes the full-length form as well as MUC1*. The lower density of full-length MUC1 does not sterically hinder T cell access to the membrane proximal MUC1*. DU145 cells represent an early stage cancer that expresses both full length and cleaved MUC1 but at lower levels so that T cell access is not sterically hindered. T47D cells represent mid-stage cancers that express high levels of both MUC1 and MUC1*, wherein the density of MUC1 full-length sterically hinders access of T cells to the tumor. HCT-MUC1* cells are a MUC1 negative cell line that has been stably transfected with MUC1*45, and they represent late stage cancer cells. It is significant that MUC1 cleaved to MUC1* by MMP9 is recognized by the anti-MUC1* antibody MNC2, which is the targeting head of the CAR. Immune cell access to tumor antigens on the cancer cell surface can be sterically hindered by the presence of bulky extra cellular domain proteins or other obstructing elements also known as the tumor micro-environment. The aforementioned serve as an example that can be extended to improve the efficacy of CAR T therapies that target other tumor antigens. In one aspect of the invention, an immune cell is transfected or transduced with both a CAR comprising an antibody fragment that targets a tumor antigen and a cleavage enzyme. In another aspect of the invention, an immune cell is transfected or transduced with both a CAR comprising an antibody fragment that targets a tumor antigen and a cleavage enzyme that cleaves a tumor antigen to a form recognized by the antibody fragment of the CAR. In one aspect, an immune cell is transfected or transduced with both a CAR comprising an antibody fragment that targets a tumor antigen and a cleavage enzyme that cleaves a tumor antigen to a form recognized by the antibody fragment of the CAR, wherein the antibody fragment of the CAR recognizes MUC1* extra cellular domain and the cleavage enzyme cleaves MUC1 to MUC1*. In one aspect, an immune cell, which may be a T cell or an NK cell, is transfected or transduced with a CAR comprising an antibody fragment derived from MNC2, MNE6, MNC3 or MNC8 and a cleavage enzyme chosen from the group comprising MMP1, MMP2, MMP3, MMP7, MMP8, MMP9, MMPP11, MMP12, MMP13, MMPP14, MMPP16, ADAM9, ADAM10, ADAM17, ADAM 19, ADAMTS16, ADAM28 or a catalytically active fragment thereof.

[0550] In one aspect of the invention, a person diagnosed with cancer or at risk of developing cancer is administered a sufficient amount of an immune cell transduced with both a CAR and a cleavage enzyme. In another aspect of the invention, a person diagnosed with cancer or at risk of developing cancer is administered a sufficient amount of an immune cell transduced with both a CAR and a cleavage enzyme, wherein the cleavage enzyme is on an inducible promoter that is activated by proteins that are expressed when the immune cell becomes activated. In another aspect of the invention, a person diagnosed with cancer or at risk of developing cancer is administered a sufficient amount of an immune cell transduced with both a CAR and a cleavage enzyme, wherein the cleavage enzyme is on an inducible promoter that is activated by one or more NFAT. In one case the NFAT is NFATc1. In another aspect, the NFAT is NFATc3. In another aspect, the NFAT is NFATc2. In any of the instances above, the extra cellular domain of the CAR comprises a fragment of an anti-MUC1* antibody. In one aspect, the anti-MUC1* antibody is MNC2scFv or a humanized form of MNC2scFv. In another aspect, the anti-MUC1* antibody is MNE6scFv or a humanized form of MNE6scFv. In any of the instances above, the immune cell can be a T cell, an NK cell, a mast cell, or a dendritic cell.

[0551] It is not intended that the present invention be limited to one or two specific methods of having expression of a cleavage enzyme induced by an activated T cell. We have demonstrated specific expression of a cleavage enzyme only upon T cell activation by constructing a plasmid with the cleavage enzyme gene downstream of an NFAT promoter sequence or downstream of one or more repeats of NFAT response elements. In another aspect of the invention, expression of the cleavage enzyme is induced by constructing a plasmid where the cleavage enzyme gene is inserted downstream of an IL-2 promoter sequence or downstream of an IL-2 response element, then inserting the plasmid into an immune cell. In another aspect of the invention, expression of the cleavage enzyme is induced by constructing a plasmid where the cleavage enzyme gene is inserted downstream of a Calcineurin promoter sequence or downstream of a Calcineurin response element, then inserting the plasmid into an immune cell and then administering to a patient for the treatment or prevention of cancers. There are also drug-inducible plasmids that can be used to induce expression of the cleavage enzyme or used to stop expression induced by an element of an activated T cell. These drug inducible systems may include tetracycline-inducible systems, Tet-on, Tet-off, tetracycline response elements, doxycycline, tamoxifen inducible systems, ecdysone inducible systems and the like.

[0552] It is not intended that the present invention be limited to one or two specific promoters used in the plasmids encoding the CARs or inducible cleavage enzymes. As is known by those skilled in the art, many promoters can be interchanged including SV40, PGK1, Ubc, CAG, TRE, UAS, Ac5, polyhedron, CaMKIIa, GAL1, GAL10, TEF1, GDS, ADH1, CaMV35S, Ubi, H1 and U6. Another solution to the problem of steric hindrance of CAR T cell access, caused by bulky cell surface proteins such as MUC1-FL, is to increase the length of the linker region of the CAR that is expressed by the T cell. In standard design CARs, the length of the extracellular linker region between the transmembrane portion and the antibody fragment is about 45-50 amino acids in length. We made long-arm CARs where the length of the extracellular linker is extended from about 50 amino acids to 217-290 amino acids. Co-culture assays show that CARs with longer extracellular linkers have improved access to the tumor-associated antigen on the target cancer cells.

[0553] BiTEs

[0554] Divalent (or bivalent) single-chain variable fragments (di-scFvs, bi-scFvs) can be engineered by linking two scFvs. This can be done by producing a single peptide chain with two V_{H} and two V_{L} regions, yielding tandem scFvs. Another possibility is the creation of scFvs with linker peptides that are too short for the two variable regions to fold together (about five amino acids), forcing scFvs to dimerize. This type is known as diabodies. Diabodies have been shown to have dissociation constants up to 40-fold lower than corresponding scFvs, meaning that they have a much higher affinity to their target. Consequently, diabody drugs could be dosed much lower than other therapeutic antibodies and are capable of highly specific targeting of tumors in vivo Still shorter linkers (one or two amino acids) lead to the formation of trimers, so-called triabodies or tribodies. Tetrabodies have also been produced. They exhibit an even higher affinity to their targets than diabodies.

[0555] All of these formats can be composed from variable fragments with specificity for two different antigens, in which case they are types of bispecific antibodies. The furthest developed of these are bispecific tandem di-scFvs, known as bi-specific T-cell engagers (BiTE antibody constructs). BiTEs are fusion proteins consisting of two scFvs of different antibodies, on a single peptide chain of about 55 kilodaltons. One of the scFvs may bind to T cells such as via the CD3 receptor, and the other to a tumor cell via a tumor specific molecule, such aberrantly expressed MUC1*.

[0556] Another aspect of the invention is a method for treating a patient diagnosed with, suspected of having, or at risk of developing a MUC1 positive or MUC1* positive cancer, wherein the patient is administered an effective amount of a BiTE wherein one antibody variable fragment of the BiTE binds to a T cell surface antigen and the other antibody variable fragment of the BiTE binds to PSMGFR (SEQ ID NO:2), or more specifically to N−10 peptide. In one case, the antibody variable fragment of the BiTE that binds to MUC1* comprises portions of MNC2, MNE6, 20A10, 3C2B1, 5C6F3, 25E6, 18G12, 28F9, 1E4, B12, B2, B7, B9, 8C7F3, or H11.

[0557] In another aspect of the invention, MUC1* peptides including PSMGFR (SEQ ID NO:2), or most or all of N−10 peptide are used in adoptive T cell approaches. In this case, a patient's T cells are exposed to the MUC1* peptides and through various rounds of maturation, the T cells develop MUC1* specific receptors. The adapted T cells are then expanded and administered to the donor patient who is diagnosed with, suspected of having, or is at risk of developing a MUC1* positive cancer.

[0558] A series of CARs were also made that had MNC2 and humanized MNC2 as the extra cellular, targeting head of the CAR. The constructs for these CARs were inserted into a plasmid that was then inserted into a Lenti viral vector. Human T cells were then transduced with the lenti viral vector carrying the MNC2 CARs and huMNC2 CARs. MNC2-scFv-CARs that were mouse sequence or humanized were generated. In one aspect of the invention, the CAR comprised huMNC2-scFv-short hinge region-transmembrane domain derived from CD8-short intracellular piece-4-1BB-3zeta. In another aspect, the transmembrane domain was derived from CD4 transmembrane sequence. In another aspect, the intracellular co-stimulatory domain was CD28-3zeta. In yet another aspect, the intracellular co-stimulatory domain was CD28-4-1BB-3zeta.

[0559] There are a variety of methods for assessing whether or not T cells recognize a target cell and are in the process of mounting an immune response. T cells cluster when they recognize a target or foreign cell. This can be readily seen with the naked eye or at low magnification. The appearance of CAR T cell clustering when co-cultured with target cancer cells is one measure of: a) whether or not they recognize the cells as target cells; and b) whether or not they are getting activated to attack the targeted cells, which in this case are cancer cells. FIGS. 45-47 show photographs of MUC1* positive T47D breast cancer cells that were either stably transfected with mCherry or dyed with CMTMR, so are red, which were co-cultured with either human T cells without a CAR or human T cells transduced with huMNC2-scFv-CAR44, or with huMNC2-scFv-CAR50. The CAR T cells are clear. As can be seen, there is no T cell induced clustering of the cancer cells when the T cell does not carry a CAR. However, when T cells carrying a MUC1* targeting CAR, there is dramatic clustering of the MUC1* positive cancer cells.

[0560] After T cells recognize and cluster target cells, they overexpress perforin and granzyme B. Together these two molecules activate a cell death pathway in the targeted cell. It is thought that the perforin makes a hole in the target cell into which the T cell injects granzyme B which then activates apoptotic proteases, causing the target cell to lyse. FIG. 55 and FIG. 56 show huMNC2-scFV-CAR44 T cells binding to target MUC1* positive prostate cancer and pancreatic cancer cells and injecting granzyme B.

[0561] Another measure of whether or not a T cell has recognized a target cell and is activated to kill that cell, is the upregulation and secretion of cytokines, interferon gamma (IFN-g) and interleukin-2 (IL-2), by the T cell. Activation of CAR T cells, as evidenced by IFN-g and IL-2 secretion, can be readily measured in vitro. CAR T cells are co-cultured with target cells and after an incubation period, the conditioned media is assayed by ELISA to detect secreted IFN-g and IL-2. In order to determine the cancer-specificity of CAR T cells wherein the targeting head of the CAR was either huMNC2 or huMNE6, these experiments were performed with huMNC2-CAR44 T cells and huMNE6-CAR44 T cells in co-culture with MUC1* positive cancer cells and normal cells. Table 1 details the MUC1 positive normal or primary cells that were tested.

TABLE 1
Normal Cell Lines and Primary Cells

| | ATCC | | |
|---|---|---|---|
| Cell Line | Designation | Tissue | Origin |
| Hep.G2 | | Liver | |
| THLE-3 | CRL-11233 | Liver | The THLE-2 (ATCC CRL-10149 and the |
| | | | THLE-3 (ATCC CRL-11233) cell lines |
| | | | were derived from primary normal liver |
| | | | cells by infection with SV40 large T |
| | | | antigen. THLE-2 and THLE-3 cells express |
| | | | phenotypic characteristics of normal adult |
| | | | liver epithelial cells. They are |
| | | | nontumorigenic when injected into athymic |
| | | | nude mice, have near-diploid karyotypes, |
| | | | and do not express alpha-fetoprotein. |
| Lonza | HUM181141 | Liver | Male, Caucasian |
| Primary | | | 2.0 months old |
| Hepatocytes | | | Induction Fold CYP1A2 (a) 14.0 |
| | | | Induction Fold CYP2B6 (b) 13.0 |
| | | | Induction Fold CYP3A4 (c) 44.0 |
| | | | Basal Activity CYP1A2 2.6 |
| | | | Basal Activity CYP2B6 0.7 |
| | | | Basal Activity CYP3A4 14.0 |
| | | | Additional Information: |
| | | | Inducer/Marker Metabolite |
| | | | (a) 0.05 mM Omeprazole/Acetaminophen |
| | | | (b) 1 mM Phenobarbital/ |
| | | | Hydroxybupropion |
| | | | (c) 0.01 mM Rifampicin/6-Beta- |
| | | | Hydroxytestosterone |
| | | | Basal activity is expressed as: pmol/million |
| | | | cells/minute |
| T/G HA- | CRL-1999 | Aortic Smooth | 11 months |
| VSMC | | Muscle | Female, Caucasian |
| CCD-18Lu | CCL-205 | Lung | This fibroblast-like cell line was derived |
| | | | from the lung tissue of a 2 month, 17-day- |
| | | | old Black female. |
| | | | The donor had cerebral anoxia, cardiac |
| | | | anomaly, sepsis, endocardial cushion defect |
| | | | and fetal alcoholic syndrome. |
| | | | Female, Black |
| | | | 2.5 months |
| HBEC-5i | CRL-3245 | Brain | Derived from small fragments of human |
| | | endothelium | cerebral cortex obtained from patients who |
| | | | had died of various causes. |
| Hs | CRL-7869 | Stomach/Intestine | 18 weeks gestation fetus |
| 738.St/Int | | | Male, Caucasian |
| | | | Part of the NBL Cell Line Collection. This |
| | | | cell line is neither produced nor fully |
| | | | characterized by ATCC. We do not |
| | | | guarantee that it will maintain a specific |
| | | | morphology, purity, or any other property |
| | | | upon passage. |
| MCF-12A | CRL-10782 | Breast | The MCF-12A cell line is a non- |
| | | | tumorigenic epithelial cell line established |
| | | | from tissue taken at reduction mammoplasty |
| | | | from a nulliparous patient with fibrocystic |
| | | | breast disease that contained focal areas of |
| | | | intraductal hyperplasia. The line was |
| | | | produced by long term culture in serum free |
| | | | medium with low Ca++ concentration. |
| | | | MCF-12A was derived from adherent cells |
| | | | in the population. |
| Hs 1.Tes | CRL-7002 | Testis | Male, Caucasian |
| | | | second trimester |
| | | | Part of the NBL Cell Line Collection. This |
| | | | cell line is neither produced nor fully |
| | | | characterized by ATCC. We do not |
| | | | guarantee that it will maintain a specific |
| | | | morphology, purity, or any other property |
| | | | upon passage. |
| HRCE | Lonza: | Kidney | Human Renal Cortical Cells (HRCE) are |
| | catalogue | | from proximal and distal tubules. |
| | #CC-2554 | | Donor info: 49 year old female, passage 2, |
| | Lot | | 95% viability, doubling time (hours) 24 hrs |
| | #0000542104 | | |

[0562] FIG. 50 is a graph of PCR measurement of the various cell lines tested, wherein mRNA levels of MUC1 are measured. The cancer cell lines that were tested in these assays were HCT-MUC1* and T47D breast cancer cells. These cells were co-cultured with huMNC2-CAR44 human T cells. Co-culture of huMNC2-CAR44 T cells with the cancer cells induced the CAR T cells to secrete large amounts of IFN-g and IL-2 into the surrounding media, yet co-culture with the MUC1 positive normal cells induced no secretion of the cytokines (FIG. 51 and FIG. 52). In addition to testing for IFN-g and IL-2 secretion by the CAR T cells, the normal cells were assayed for signs of cell death, which could have been induced by the CAR T cells if the antibody targeting head were not extremely cancer-specific. After co-culture with huMNC2-CAR44 T cells, the cells were incubated with a cell death marker, then assayed by FACS. huMNC2-CAR44 T cells induced no cell death in the normal cells (FIG. 53A-53J).

[0563] In addition to FACS analysis, many researchers now use an xCELLigence instrument to measure CAR T killing of cancer cells. FACS is not the best method for tracking T cell induced cell killing because the T cells lyse the target cell. By FACS it is difficult to measure dead cells because they are excluded as cell debris, so one must infer an amount of cell killing and by various methods determine if the missing cells are T cells or cancer cells.

[0564] The xCELLigence instrument uses electrode arrays upon which cancer cells are plated. The adherent cancer cells insulate the electrode and so cause an increase in impedance as they grow. Conversely, T cells are not adherent and remain in suspension so do not contribute to insulation of the electrode which would increase impedance. However, if the T cells or CAR T cells kill the cancer cells on the electrode plate, the cancer cells ball up and float off as they die, which causes the impedance to decrease. The xCELLigence instrument measures impedance as a function of time, which is correlated to cancer cell killing. In addition, the electrode plates also have a viewing window. When CAR T cells effectively kill the adsorbed target cancer cells, there is a decrease in impedance but also one can see that there are no cancer cells left on the plate surface.

[0565] FIGS. 55A-55H show the cytotoxic effect of huMNC2-CAR44 T cells on MUC1* positive DU145 prostate cancer cells as measured by a variety of assays. FIG. 55A is a fluorescent photograph of untransduced T cells co-cultured with the prostate cancer cells, wherein granzyme B is stained with a red fluorophore. FIG. 55C is a fluorescent photograph of huMNC2-CAR44 T cells co-cultured with the prostate cancer cells, wherein granzyme B is stained with a red fluorophore. FIG. 55D is the DAPI and granzyme B merge. FIG. 55E is a FACS scan for fluorescently labeled granzyme B for untransduced T cells incubated with the cancer cells. FIG. 55F is a FACS scan showing a positive increase in fluorescently labeled granzyme B for huMNC2-CAR44 T cells incubated with the cancer cells. FIG. 55G is a graph of the mean fluorescent intensity. FIG. 55H is an xCELLigence scan tracking the real-time killing of DU145 cancer cells by huMNC2-CAR44 T cells (blue trace) but not by untransduced T cells (green). FIGS. 56A-56H show the cytotoxic effect of huMNC2-CAR44 T cells on MUC1* positive CAPAN-2 pancreatic cancer cells as measured by a variety of assays. FIG. 56A is a fluorescent photograph of untransduced T cells co-cultured with the pancreatic cancer cells, wherein granzyme B is stained with a red fluorophore. FIG. 56B is the DAPI and granzyme B merge. FIG. 56C is a fluorescent photograph of huMNC2-CAR44 T cells co-cultured with the pancreatic cancer cells, wherein granzyme B is stained with a red fluorophore. FIG. 56D is the DAPI and granzyme B merge. FIG. 56E is a FACS scan for fluorescently labeled granzyme B for untransduced T cells incubated with the cancer cells. FIG. 56F is a FACS scan showing a positive increase in fluorescently labeled granzyme B for huMNC2-CAR44 T cells incubated with the cancer cells. FIG. 56G is a graph of the mean fluorescent intensity. FIG. 56H is an xCELLigence scan tracking the real-time killing of CAPAN-2 cancer cells by huMNC2-CAR44 T cells (blue trace) but not by untransduced T cells (green). FIGS. 57A-57C show xCELLigence scans tracking the real-time killing of MUC1* positive cancer cells, but not MUC1* negative cells, by huMNC2-CAR44 T cells. FIG. 57A shows that huMNC2-CAR44 T cells effectively kill HCT colon cancer cells that have been stably transfected with MUC1*. FIG. 57B shows that huMNC2-CAR44 T cells have almost no effect on HCT-MUC1-41TR, which is a MUC1 negative cancer cell that has been stably transfected with a MUC1 full-length. In this cell line only about 10% of the cell have MUC1 cleaved to MUC1*. FIG. 57C shows that huMNC2-CAR44 T cells have no effect on HCT-116 cells, which is a MUC1 negative colon cancer cell line.

[0566] These data demonstrate that T cells transduced with a CAR wherein the antibody fragment targeting head is MNC2, effectively kill MUC1* positive cancer cells. These data specifically show that huMNC2-scFV-CAR44 transduced into human T cells effectively kill MUC1* positive cancer cells. Because we and others have now demonstrated that the most important aspect of CAR T function is the targeting antibody fragment, it follows that an immune cell or a T cell transduced with any CAR having the antibody fragment MNC2-scFV or huMNC2-scFV would have similar efficacy against MVUC1 or MVUC1* positive tumors. For example, the hinge region that connects the scFv to the transmembrane portion could be any flexible linker. The intracellular co-stimulatory domains could be CD28-3zeta, CD28-4-1BB-3zeta or any combination of immune cell co-stimulatory domains.

[0567] FIG. 61 shows an experiment in which huMNC2-scFv-CAR44 transduced human T cell that were bead stimulated (Protocol 1) or cancer cell stimulated (Protocol 2) were tested for their ability to inhibit tumor growth in animals. Human cancer cells that had been stably transfected with Luciferase were injected into female NOD/SCID/GAMMA (NSG) mice between 11 and 15 weeks of age. 500,000 BT-20 breast cancer cells were injected sub-cutaneously into a rear flank. Tumor engraftment was verified by injecting the animals with Luciferin and then imaging the fluorescent cancer cells using an IVIS instrument. IVIS images taken Day 5 post implantation showed the presence of tumor cells. On Day 6 after IVIS measurement, animals were given a one-time injection of 10 million of either human T cells transduced with huMNC2-scFv-CAR44 or untransduced T cells. 5 million T cells were injected intra-tumor and 5 million were injected into the tail vein. 10 minutes prior to IVIS photographs, mice were IP injected with Luciferin, which fluoresces after cleavage by Luciferase, thus making tumor cells fluoresce. FIGS. 61A, 61D, 61G show photographs of mice that were treated with huMNC2-scFv-CAR44 T cells that had been pre-stimulated by co-culturing for 24 hours with 4 μm beads to which was attached a synthetic MUC1*, PSMGFR peptide 24 hours prior to administration, “Protocol 1”. FIGS. 61B, 61E, 61H show photographs of mice that were treated with huMNC2-scFv-CAR44 T cells that had been pre-stimulated by twice co-culturing for 24 hours with MUC1* positive cancer cells 24 hours prior to administration, “Protocol 2”. As can be seen in FIG. 61, huMNC2-CAR44 T cells that were peptide-bead stimulated inhibited tumor growth better than cells pre-stimulated by incubation with live cancer cells, which likely contaminated the target cells and increased the tumor volume.

[0568] huMNC2-scFv-CAR44 transduced human T cell that were bead stimulated (Protocol 1) or cancer cell stimulated (Protocol 2) were also tested for their ability to inhibit tumor growth in animals. Human cancer cells that had been stably transfected with Luciferase were injected into female NOD/SCID/GAMMA (NSG) mice between 11 and 15 weeks of age. In another experiment, 500,000 BT-20 MUC1* positive triple negative breast cancer cells were injected sub-cutaneously into a rear flank. Tumor engraftment was verified by injecting the animals with Luciferin and then imaging the fluorescent cancer cells using an IVIS instrument. IVIS images taken Day 6 post implantation showed the presence of tumor cells. On Day 6, after IVIS imaging, 10M huMNC2-scFv-CAR44 T cells were administered to the animals. 5M of the CAR T cells were administered by intratumor injection and the other 5M were administered by tail vein injection. Control group was injected by same administration routes with the same number of untransduced T cells. IVIS measurements of tumor burden were taken on Days 6, 8, and 12. As can be seen in FIGS. 61A-61J, both groups of mice treated with huMNC2-CAR44 T cells showed a decrease in tumor burden compared to the control group.

[0569] huMNC2-scFv-CAR44 transduced human T cell that were bead stimulated (Protocol 1) were also tested for their ability to inhibit ovarian cancer growth in animals. Human SKOV-3 MUC1* positive ovarian cancer cells that had been stably transfected with Luciferase were injected into female NOD/SCID/GAMMA (NSG) mice between 11 and 15 weeks of age. In one experiment, 500,000 SKOV-3 cancer cells were injected into the intraperitoneal cavity to mimic metastatic ovarian cancer in humans. Tumor engraftment was verified by injecting the animals with Luciferin and then imaging the fluorescent cancer cells using an IVIS instrument. IVIS images taken Day 3 post implantation showed the presence of tumor cells. On Day 4 and Day 11, post tumor implantation, 10M huMNC2-scFv-CAR44 T cells were IP administered to the animals. On Day 4, CAR T cells were IP injected. On Day 11 half the CAR T cells were injected into the intraperitoneal space and the other half was injected into the tail vein. Control groups were injected by same administration routes with either the same number of untransduced T cells or same volume of PBS. Subsequent IVIS measurements of tumor burden were taken on Day 7, Day 10 and Day 15. As can be seen in FIGS. 62A-62L, control mice have tumors that are growing at a much faster rate than the huMNC2-CAR44 T cell treated mice. FIG. 62M shows the IVIS color bar correlating photons/second to color.

[0570] One aspect of the invention is a method for treating a patient diagnosed with, suspected of having, or at risk of developing a MUC1 positive or MUC1* positive cancer, wherein the patient is administered an effective amount of immune cells that have been transduced with a MUC1* targeting CAR, wherein the CAR is chosen from among the group consisting of MN-E6-CD8-CD28-3z (SEQ ID NOS:297-298); MN-E6-CD4-CD28-3z (SEQ ID NOS:748-749); MN-E6-CD8-41BB-3z (SEQ ID NOS:300-301); MN-E6-CD4-41BB-3z (SEQ ID NOS:750-751); MN-E6-CD8-CD28-41BB-3z (SEQ ID NOS:303-304); MN-E6-CD4-CD28-41BB-3z (SEQ ID NOS:754-755); MN-E6scFv-Fc-8-41BB-CD3z (SEQ ID NOS:310-311); MN-E6scFv-IgD-Fc-8-41BB-CD3z (SEQ ID NOS:770-771); MN-E6scFv-FcH-8-41BB-CD3z (SEQ ID NOS:315-316); MN-E6scFv-IgD-FcH-8-41BB-CD3z (SEQ ID NOS:772-773); MN-E6scFv-Fc-4-41BB-CD3z (SEQ ID NOS:318-319); MN-E6scFv-FcH-4-41BB-CD3z (SEQ ID NOS:321-322); MN-E6scFv-IgD-8-41BB-CD3z (SEQ ID NOS:323-324); MN-E6scFv-IgD-4-41BB-CD3z (SEQ ID NOS:327-328); MN-E6scFv-X4-8-41BB-CD3z (SEQ ID NOS:330-331); MN-E6scFv-X4-4-41BB-CD3z (SEQ ID NOS:333-334); MN-E6scFv-8-4-41BB-CD3z (SEQ ID NOS:336-337), or any of the aforementioned CARs wherein the MN-E6 is replaced by fragment derived from MNC2, MNE6, 20A10, 3C2B1, 5C6F3, 25E6, 18G12, 28F9, 1E4, B12, B2, B7, B9, 8C7F3, or H11. Another aspect of the invention is a method for treating a patient diagnosed with, suspected of having, or at risk of developing a cancer, wherein the patient is administered an effective amount of immune cells that have been transduced with one of the aforementioned CARs wherein the MN-E6 is replaced by a peptide comprising antibody variable domain fragments that are specific for a cancer antigen. In any of the above methods, the immune cell may be a T cell and may further be isolated from the patient to be treated.

[0571] Other MUC1 Cleavage Sites

[0572] It is known that MUC1 is cleaved to the growth factor receptor form, MUC1*, on some healthy cells in addition to cancer cells. For example, MUC1 is cleaved to MUC1* on healthy stem and progenitor cells. A large percentage of bone marrow cells are MUC1* positive. Portions of the intestine are MUC1* positive.

[0573] The inventors have discovered that MUC1 can be cleaved at different positions that are relatively close to each other but the location of cleavage changes the fold of the remaining portion of the extracellular domain. As a result, monoclonal antibodies can be identified that bind to MUC1* cleaved at a first position but do not bind to MUC1* that has been cleaved at a second position. This discovery is disclosed in WO2014/028668, filed Aug. 14, 2013, the contents of which are incorporated by reference herein its entirety. We identified a set of anti-MUC1* monoclonal antibodies that bind to MUC1* as it appears on cancer cells but do not bind to MUC1* as it appears on stem and progenitor cells. Conversely, we identified a second set of monoclonal antibodies that bind to stem and progenitor cells but do not bind to cancer cells. One method used to identify stem specific antibodies is as follows: supernatants from monoclonal hybridomas were separately adsorbed onto 2 multi-well plates. Stem cells, which are non-adherent cells, were put into one plate and cancer cells which are adherent were put into an identical plate. After an incubation period, the plates were rinsed and inverted. If the non-adherent stem cells stuck to the plate, then the monoclonal antibody in that particular well recognizes stem cells and will not recognize cancer cells. Antibodies that did not capture stem cells or antibodies that captured cancer cells were identified as cancer specific antibodies. FACS analysis has confirmed this method works.

[0574] Antibodies MN-E6 and MN-C2 are examples of cancer-specific antibodies. Antibodies MN-C3 and MN-C8 are examples of stem-specific antibodies. Although both sets of antibodies are able to bind to a peptide having the PSMGFR sequence, FACS analysis shows that the anti-MUC1* polyclonal antibody and MN-C3 bind to MUC1* positive bone marrow cells but MN-E6 does not. The MUC1* polyclonal antibody was generated by immunizing a rabbit with the PSMGFR peptide. Similarly, MN-C3 binds to stem cells of the intestinal crypts but MN-E6 does not. Conversely, MN-E6 antibody binds to cancerous tissue while the stem-specific MN-C3 does not. Competition ELISA experiments indicate that the C-terminal 10 amino acids of the PSMGFR peptide are required for MN-E6 and MN-C2 binding, but not for MN-C3 and MN-C8. Therefore, another method for identifying antibodies that are cancer specific is to immunize with a peptide having the sequence of the PSMGFR peptide minus the 10 N-terminal amino acids or use that peptide to screen for antibodies or antibody fragments that will be cancer specific. Antibodies that bind to a peptide with a sequence of PSMGFR peptide minus the N-terminal 10 amino acids, referred to herein as N−10 peptide, but do not bind to a peptide with a sequence of PSMGFR peptide minus the C-terminal 10 amino acids, C−10 peptide, are cancer specific antibodies for use in the treatment or prevention of cancers.

[0575] The extracellular domain of MUC1 is also cleaved on stem cells and some progenitor cells, where activation of cleaved MUC1 by ligands NME1 in dimer form or NME7 promotes growth and pluripotency and inhibits differentiation. The transmembrane portion of MUC1 that remains after cleavage is called MUC1* and the extracellular domain is comprised essentially of the Primary Sequence of MUC1 Growth Factor Receptor (PSMGFR) sequence. However, the exact site of cleavage can vary depending on cell type, tissue type, or which cleavage enzyme a particular person expresses or overexpresses. In addition to the cleavage site that we previously identified which leaves the transmembrane portion of MUC1* comprising most or all of the PSMGFR (SEQ ID NO:2), other cleavage sites could possibly result in an extended MUC1* comprised of most or all of SNIKFRPGSVVVQLTLAFREGTINVHDVETQFNQYKTEAASRY (SEQ ID NO:620); or

[0576] SVVVQLTLAFREGTINVHDVETQFNQYKTEAASRY (SEQ ID NO:621).

[0577] To test this hypothesis, and to determine if antibodies to an N-terminally extended PSMGFR, would generated more cancer-specific antibodies than antibodies that bind to the PSMGFR, we generated monoclonal antibodies by immunization with peptides:

(PSMGFR)
(SEQ ID NO: 2)
GTINVHDVETQFNQYKTEAASRYNLTISDVSVSDVPFPFSAQSGA,
(N+20/C−27)
(SEQ ID NO: 822)
SNIKFRPGSVVVQLTLAFREGTINVHDVETQFNQYKTE,
or
(N+9/C−9)
(SEQ ID NO: 824)
VQLTLAFREGTINVHDVETQFNQYKTEAASRYNLTISDVSVSDVP

[0578] Monoclonal antibodies generated from immunization with the same peptide can also show differences in reactivity to the same cancerous tissue specimen. These results indicate that the monoclonal antibodies recognize different conformations of the truncated MUC1 extra cellular domain produced by immunizing with different length peptides, mimicking different cleavage sites, or from cleavage at different sites in the host animal. Antibodies that recognize different cleavage site conformations may be cancer sub-type specific or patient specific, depending on which cleavage enzyme their tumor expresses. In one aspect of the invention, a patient diagnosed with a certain type of cancer is treated with an antibody of the invention that recognizes a cleaved MUC1 wherein the antibody is specific for cleavage by a specific enzyme that is known to be typically expressed by that sub-type of cancer. In another aspect, a patient tumor is analyzed to determine which enzyme his or her tumor expresses and an antibody that recognizes a MUC1 cleaved by that enzyme is then administered to the patient for the treatment of their cancer. The antibody may be in the form of a CAR, a BiTE, an ADC, or a bispecific antibody.

[0579] We previously reported that it is the MUC1 transmembrane cleavage product, called MUC1* (muk1 star), that mediates tumor growth and not full-length MUC1 (Mahanta et al 2008). MUC1* is a growth factor receptor that is activated by ligand induced dimerization of its short extra cellular domain (FIG. 1A). Dimerization of the MUC1* extra cellular domain activates the MAP kinase signaling cascade and stimulates growth and survival of cancer cells (Fessler et al 2009). Bivalent antibodies that dimerize the MUC1* extra cellular domain stimulate cancer cell growth while the monovalent Fab of the same antibody, which cannot dimerize, inhibits cancer cell growth. We demonstrated this in vitro (FIG. 1B) and in vivo (FIG. 7A-7B).

[0580] We then identified the natural ligands that dimerize and activate MUC1* growth factor receptor function. Dimers of NME1 bind to and dimerize the MUC1* extra cellular domain and stimulate growth (FIG. 1C and Smagghe et al 2013). NME1 can turn its growth factor properties off. NME1 is secreted by MUC1* positive cells. Dimeric NME1 binds to MUC1* to stimulate growth. However, as the cell population grows, more and more NME1 is secreted from the cells. At high concentrations, the NME1 dimers multimerize and form hexamers, which do not bind to MUC1*, but likely bind to some unknown receptor, as the addition of NME1 hexamers turns off growth. NME1 is an adult form. The embryonic form is NME7_{AB} (Carter et al 2016). Each NME7_{AB} monomer has two binding sites for MUC1* so as a monomer it dimerizes MUC1* (FIG. 1D), stimulates growth and cannot turn itself off. In the developing embryo, BRD4 turns off NME7 and its co-factor JMJD6 turns on the self-regulating form, NME1. However, in cancers, NME7, which should be silenced in adult life, is aberrantly expressed again, where is renders the MUC1* growth factor receptor constitutively active.

[0581] In vitro, NME1 (SEQ ID NO:4) and NME7_{AB} (SEQ ID NO:827) bind to the PSMGFR portion of the MUC1* extra cellular domain. Both growth factors can bind to the PSMGFR peptide (SEQ ID NO:2) even if the 10 N-terminal amino acids are deleted, referred to herein as N−10 (SEQ ID NO:3). However, neither NME1 nor NME7_{AB} can bind to the PSMGFR peptide if the 10 membrane proximal amino acids are deleted (FIG. 2A-2D), referred to herein as C−10 (SEQ ID NO:825). In summary, the epitope to which NME1 and NME7_{AB} bind includes all or part of the 10 membrane proximal amino acids: PFPFSAQSGA (SEQ ID NO:1743). We tested various antibodies that were generated in animals by immunizing with the PSMGFR peptide for their ability to recognize cancer cells but not healthy cells. Among the most cancer selective were the MNC2 and MNE6 monoclonal anti-MUC1* antibodies. Two other monoclonal antibodies that were generated from immunizing animals with the PSMGFR peptide are MNC3 and MNC8. Although MNC2, MNE6, MNC3 and MNC8 all bind to the PSMGFR peptide, like NME1 and NME7_{AB}, MNC2 and MNE6 bind strongly to the N−10 peptide but not to the C−10 peptide (FIG. 2B-2C). In fact, MNC2 and MNE6 competitively inhibit the binding of NME1 and NME7_{AB} to PSMGFR (FIG. 3A-3C). Conversely, MNC3 and MNC8 bind to the C−10 peptide, bind less well to the N−10 peptide and do not compete with NME1 nor NME7A for binding to MUC1* peptides, including PSMGFR (FIG. 2E-2F). MNC3 and MNC8 are far less cancer specific than MNC2 and MNE6. MNC3 and MNC8 recognize stem and progenitor cells, such as hematopoietic stem cells, whereas MNC2 and MNE6 do not (FIG. 39-41). Because hematopoietic stem cells are the progenitor cells for the blood cells, it would be problematic to have a cancer therapeutic that would also target such an important normal cell type.

[0582] Because MUC1* is generated by enzymatic cleavage of MUC1, we researched which cleavage enzymes cleave MUC1 to a MUC1* and whether or not we could identify antibodies that would recognize a MUC1* generated by a first cleavage enzyme but not MUC1* generated by a second cleavage enzyme. We found that MNC2 and MNE6 recognized a MUC1* generated by cleavage of MUC1 by MMP9 but not by cleavage by other enzymes such as MMP2 (FIG. 37 and FIG. 75). We note that MMP9 is overexpressed in cancers and is a predictor of poor prognosis (vant Veer et al 2002; Dufour et al 2011) and has been implicated in metastasis (Owyong et al, 2019), whereas MMP2 is expressed in bone marrow. One antibody binding to a MUC1* generated by cleavage by a first enzyme but not by cleavage by a second enzyme implies that the antibody recognizes a conformational epitope rather than a linear epitope.

[0583] We reasoned that the most cancer specific antibodies would be those antibodies that are characterized by some combination of most or all of the following:

[0584] Antibody binds to PSMGFR peptide;

[0585] Antibody does not bind to full-length MUC1;

[0586] Antibody binds to N−10;

[0587] Antibody does not bind to C−10;

[0588] Antibody competitively inhibits binding of NME1 or NME7_{AB} to MUC1* extra cellular domain or a PSMGFR peptide;

[0589] Antibody recognizes a MUC1* generated by cleavage by MMP9;

[0590] Antibody recognizes a conformational epitope not a linear epitope.

[0591] MNC2 and MNE6 are Cancer Specific.

[0592] Our experiments show that both MNC2 and MNE6: a) Bind to tumor cells; b) monovalent forms block tumor growth in vitro and in vivo; c) have minimal to no binding of normal tissue while having robust binding to a wide panel of tumor tissues; d) when incorporated into CAR T cells, MNC2 and MNE6 directed CAR T cells do not recognize full-length MUC1 and do not kill cells that only express full-length MUC1; e) MNC2 and MNE6 directed CAR T cells cluster then kill tumor cells expressing MUC1*; and f) MNC2 and MNE6 recognize a MUC1 cleavage product when it is cleaved by MMP9.

[0593] MNC2 directed CAR T cells do not recognize normal, healthy cells that are MUC1* positive. A panel of normal cell lines, as well as primary cells, were co-cultured with huMNC2-CAR44 T cells. The normal cell populations were analyzed to determine whether or not the MNC2 directed CAR T cells killed them. The CAR T cells were analyzed to see if co-culture with the MUC1 positive normal cells activated the killing function of the CAR T cells, as measured by secretion of IL-2 or interferon gamma. As FIGS. 50-52 show, the MNC2 directed CAR T cells did not kill the normal cells, nor was there cytokine secretion, indicative of T cell activation. In addition, over 2,000 human tissue specimens were analyzed. The results showed that neither MNC2 nor MNE6 showed any significant binding to normal tissues but showed robust staining of a wide panel of cancerous tissues. For example, MNC2 stained 93% breast cancer specimens, 83% ovarian, 78% pancreatic and 71% lung cancer specimens. In addition, patient-matched primary tumors (FIG. 54) and subsequent metastases showed that the amount of MNC2-reactive MUC1* increased with tumor progression and metastases. In summary, MNC2 is a highly cancer specific antibody.

[0594] Characterization of MNC2 and MNE6

[0595] Our gold standard, cancer-specific antibodies MNC2 and MNE6: 1) bind to N−10 peptide but not to the C−10 peptide; 2) compete with NME7_{AB} and dimeric NME1 for the same binding site near the C-terminus of the PSMGFR peptide, which is the membrane proximal portion of MUC1* on cells; 3) do not work in a Western blot assay indicating that they recognize a conformational rather than linear epitope; 4) recognize a MUC1* generated when MUC1 is cleaved by MMP9; 5) do not bind to full-length MUC1 but only to the cleaved form, MUC1*, in model cell lines as well as cancer cell lines; 6) show little to no binding to normal tissues but robustly stain a wide variety of tumor tissues; and 7) share some consensus sequences in their Complementarity Determining Regions, CDRs.

[0596] In an effort to identify other antibodies that are highly cancer-specific, like MNC2 and MNE6, we subjected new antibodies to a set of seven (7) characterization experiments: 1) epitope binding assays; 2) functional assays such as the ability to displace activating growth factor NME7_{AB} or dimeric NME1 from binding to MUC1* peptides PSMGFR or N−10; 3) Western blots to determine whether or not the antibodies recognized a linear epitope versus a conformational epitope, in which case the antibodies would not work in a Western; 4) binding assays to see if the antibodies recognized a cleaved MUC1 that was dependent on cleavage by MMP9; 5) FACS analysis to measure the ability of the antibodies to recognize MUC1* positive cells but not full-length MUC1; and FACS analysis to measure the ability of the antibodies to recognize MUC1/MUC1* positive cancer cells; 6) immunohistochemistry, IHC, assays of normal tissues versus cancerous tissues to determine true cancer specificity; and 7) aligning antibody sequences to determine if subsets of antibodies shared consensus sequences that could predict their cancer specificity or lack thereof.

[0597] Monoclonal antibodies were produced by immunizing animals with peptides derived from a MUC1 that is devoid of tandem repeats. These antibodies included PSMGFR and peptides that were extended at the N-terminus of PSMGFR. Immunizing peptides were:

[0598] PSMGFR (SEQ ID NO:2))

[0599] N+9/C−9 (9 amino acids added onto the N-terminus and 9 amino acids deleted from the C-terminus) (SEQ ID NO:824)

[0600] N+20/C−27 (20 amino acids added onto the N-terminus and 27 amino acids deleted from the C-terminus) (SEQ ID NO:823)

[0601] These monoclonal antibodies were then tested to determine which satisfied the seven (7) characterization criteria cited above, which we reasoned would identify the most cancer specific antibodies.

[0602] Epitope Binding Assays

[0603] ELISA assays were performed to determine if, in addition to recognizing their immunizing peptide, they recognized PSMGFR, N−10 or C−10. In addition, they were tested for their ability to bind to N+20/C−27, N+9/C−9. We first did the ELISA assay on our set of reference antibodies, MNC2, MNE6, which we know are cancer-specific plus MNC3, which we know recognizes stem cells and progenitor cells (FIG. 63A-63B). None of the reference antibodies bound to the N+20/C−27 peptide. MNC2 and MNE6 cannot bind to PSMGFR peptides with 27, 10 or 9 C-terminal deletions, however, MNC3 binds to C−10 and to N+9/C−9 peptides.

[0604] This same ELISA assay was performed on the antibodies of the invention (FIG. 64-66 and FIG. 201). The binding patterns of the antibodies that were generated by immunizing with the PSMGFR peptide are shown in FIG. 64A-64B. Note that only 20A10 exactly matches the binding profile of MNC2 and MNE6. 25E6, 28F9 and 18G12 are all able to bind to the N−10 peptide. 18B4 is the only antibody raised against the PSMGFR peptide that requires the 10 most N-terminal amino acids of the peptide. The color of the bars for each antibody in the ELISA graph are color coded to match the deductive cognate sequence, or a portion thereof, of that antibody. In addition, another set of antibodies was assayed by ELISA (FIG. 201). Of this set, B12, B2, B7, B9, 8C7F3, and H11 bound to the PSMGFR peptide, bound to the N−10 peptide, but not to the C−10 peptide (FIG. 201). The binding patterns of the antibodies that were generated by immunizing with the N+20/C−27 peptide are shown in FIG. 65A-65B. Although these antibodies were raised against the N+20/C−27 peptide, all but one, 45C11, still bind to the PSMGFR peptide, albeit at the N-terminal portion of PSMGFR. The binding of 45C11 is weak but deductive reasoning shows that all or some of the cognate epitope must lie within SNIKFRPGSVV (SEQ ID NO:1744).

[0605] Of the antibodies generated by immunizing with the N+9/C−9 peptide, 8A9 and 17H6 do not bind to the PSMGFR peptide, so must bind to the 9 additional N-terminal amino acids. Antibodies 3C5 and 39H5 appear to bind to the 10 most N-terminal amino acids of the PSMGFR peptide.

[0606] In order to further refine the epitopes to which each antibody binds, a series of smaller peptides derived from the PSMGFR sequence were synthesized: N−30 (SEQ ID NO:7), N−26 (SEQ ID NO:6), N−19 (SEQ ID NO:4), N−10/C−5 (SEQ ID NO:8), N−19/C−5 (SEQ ID NO:9). Each of the antibodies was tested in an ELISA assay for their ability to bind to this refined set of peptides, plus PSMGFR, N−10 and C−10 peptides (FIG. 67-69).

[0607] In FIG. 67A-67D, antibodies generated by immunization with the PSMGFR peptide were assayed. As can be seen in the figure, amino acids ASRYNLT (SEQ ID NO:1745), which are essentially in the middle of the PSMGFR peptide, are important or essential for the binding of 28F9, 18G12, 25E6, and MNC3 antibodies. Amino acids GTINVHDVET (SEQ ID NO:1746), which comprise the most N-terminal part of the PSMGFR peptide are important or essential for the binding of the 18B4 antibody. Amino acids FPFS (SEQ ID NO:1747) are important or essential for the binding of 20A10, MNC2 and MNE6. We note that these three antibodies recognize a conformational epitope, not a linear epitope. Because the proline in the FPFS sequence significantly alters the conformation of nearby portions of the PSMGFR peptide, it is also possible that the antibodies do not bind directly to these four amino acids, but that the absence of the proline alters the fold of the remaining peptide such that the conformation to which 20A10, MNC2 and MNE6 bind, is no longer present.

[0608] In FIG. 68A-68D, antibodies generated by immunization with the N+20/C−27 peptide were assayed. As can be seen in the figure, amino acids GTINVHDVET, which comprise the most N-terminal part of the PSMGFR peptide are important or essential for the binding of the 29H1, 32C1, and 31A1 antibodies. Amino acids SNIKFRPGSVVVQLTLAFRE (SEQ ID NO:1748), which is 20 additional amino acids N-terminal to the PSMGFR peptide and outside of the PSMGFR peptide, are important or essential for the binding of antibody 45C11. However, referring back to FIG. 65, antibody 45C11 was not able to bind to the N+9/C−9 peptide, therefore we conclude that amino acids within the SNIKFRPGSVV sequence are essential for the binding of 45C11. Amino acids QFNQYKTEA (SEQ ID NO:1749), which are still within the sequence of PSMGFR, are important or essential for the binding of antibody 1E4.

[0609] In FIG. 69A-69D, antibodies generated by immunization with the N+9/C−9 peptide were assayed. As can be seen in the figure, amino acids GTINVHDVET, which comprise the most N-terminal part of the PSMGFR peptide are important or essential for the binding of the 39H5 and 3C5 antibodies. As can be seen in the figure, amino acids VQLTLAFRE (SEQ ID NO:1750), which is 9 additional amino acids N-terminal to the PSMGFR peptide and outside of the PSMGFR peptide, are important or essential for the binding of antibodies 17H6 and 8A9. Because the 17H6 and 8A9 antibodies do not bind to any of the smaller peptides shown in this figure, refer to FIG. 66A-66C, which shows that these two antibodies only bind to the peptide that has 9 additional amino acids N-terminal to the PSMGFR peptide.

[0610] Table 2 below lists antibodies of the invention and their cognate epitopes.

TABLE 2

| Immunizing | Antibody | |
|---|---|---|
| Peptide | Name | Cognate Sequence |
| PSMGFR | MNC2 | FPFS or PFPFSAQSGA |
| | MNE6 | FPFS or PFPFSAQSGA |
| | 20A10 | FPFS or PFPFSAQSGA |
| | 3C2B1 | FPFS or PFPFSAQSGA |
| | 5C6F3 | SVSDV |
| | MNC3 | ASRYNLT |
| | 25E6 | ASRYNLT |
| | 28F9 | ASRYNLT |
| | 18G12 | ASRYNLT |
| | 18B4 | GTINVHDVET |
| N+20/C−27 | 45C11 | SNIKFRPGSVV |
| | 29H1 | GTINVHDVET |
| | 32C1 | GTINVHDVET |
| | 31A1 | GTINVHDVET |
| | 1E4 | QFNQYKTEA |
| N+9/C−9 | 17H6 | VQLTLAFRE |
| | 8A9 | VQLTLAFRE |
| | 39H5 | GTINVHDVET |
| | 3C5 | GTINVHDVET |

[0611] Ability to Displace NME7_{AB} Binding to the MUC1* Extra Cellular Domain Peptide PSMGFR

[0612] We previously reported that dimeric NME1 dimerizes MVUC1* extra cellular domain and stimulates growth. Monomeric NME7_{AB} has two binding sites for MUC1* so that as a monomer it dimerizes MVUC1* and mediates cancer cell growth. We showed that NME1 and NME7_{AB} can bind to the MUC1* extra cellular domain. In vitro, NME1 and NME7_{AB} bind to the PSMGFR peptide even if the 10 N-terminal amino acids are deleted, referred to herein as N−10 (SEQ ID NO:3). However, neither NME1 nor NME7_{AB} can bind to the PSMGFR peptide if the 10 membrane proximal amino acids are deleted, referred to herein as C−10 (SEQ ID NO:825). In summary, the epitope to which NME1 and NME7_{AB} bind includes all or part of the 10 membrane proximal amino acids: PFPFSAQSGA (SEQ ID NO:1743). We tested various antibodies that were generated in animals by immunizing with the PSMGFR peptide for their ability to recognize cancer cells but not healthy cells. Among the most cancer selective were the MNC2 and MNE6 monoclonal anti-MUC1* antibodies. Two other monoclonal antibodies that were generated from immunizing animals with the PSMGFR peptide are MNC3 and MNC8. Although MNC2, MNE6, MNC3 and MNC8 all bind to the PSMGFR peptide, like NME1 and NME7_{AB}, MNC2 and MNE6 bind strongly to the N−10 peptide but not to the C−10 peptide. In fact, MNC2 and MNE6 competitively inhibit the binding of NME1 and NME7_{AB} to PSMGFR. Conversely, MNC3 and MNC8 are able to bind to the C−10 peptide, bind less well to the N−10 peptide and do not compete with NME1 nor NME7_{AB} for binding to MUC1* peptides, including PSMGFR (FIG. 70A-70B). MNC3 and MNC8 are less cancer specific than MNC2 and MNE6. MNC3 and MNC8 recognize stem and progenitor cells, such as hematopoietic stem cells, whereas MNC2 and MNE6 do not. Because hematopoietic stem cells are the progenitor cells for the blood cells, it would be problematic to have a cancer therapeutic that would also target such an important normal cell type.

[0613] In this experiment, antibodies of the invention were tested for their ability to displace NME7A from binding to the PSMGFR peptide. In this experiment, a multi-well plate was coated with the PSMGFR peptide. Recombinant NME7_{AB} was allowed to bind to the surface-immobilized PSMGFR peptide. Wash steps followed. Various antibodies were added, followed by wash steps. The amount of NME7_{AB} that remained attached to the PSMGFR coated plate, after antibody competition, was measured by detecting a tag on the NME7_{AB}. As a control, anti-NME7_{AB} antibodies were also tested for their ability to displace NME7_{AB} from the PSMGFR. FIG. 70A shows a graph of an ELISA displacement assay. The bar graph is color coded to indicate the cognate epitope to which each antibody binds. As can be seen in the figure, the antibodies that bind to the more C-terminal portions of PSMGFR are the most potent at disrupting the binding of onco-embryonic growth factor NME7_{AB} to the MUC1* extra cellular domain or the PSMGFR peptide. The rank order of potency for disrupting binding of NME7_{AB} to PSMGFR according to their cognate epitope is as follows: FPFS>ASRYNLT>QFNQYKTEA>GTINVHDVET. Antibodies that bind to epitopes outside of the PSMGFR peptide, such as 45C11, 8A9 and 17H6 did not compete with NME7_{AB} for binding.

[0614] Western Blot Assay to Determine Linear Versus Conformational Cognate Epitope

[0615] Antibodies were tested to determine whether they recognize a linear or a conformational epitope. Only antibodies that recognize a linear epitope work in Western blots when using denaturing gels. For comparison, known antibodies were tested for their ability to bind to HCT-116, a MUC1 negative cancer cell line, HCT-MUC1-18, which is a cleavage resistant clone of HCTs transfected with full-length MUC1, and HCTs transfected with MUC1*, wherein the extra cellular domain comprises only the PSMGFR sequence. The antibodies tested for comparison are MNC2 and MNE6, which were known to only recognize a conformational epitope, SDIX which is a polyclonal antibody raised against PSMGFR and VU4H5, which is a commercially available monoclonal antibody that recognizes the tandem repeats of full-length MUC1 (FIG. 71A-71D). As can be seen, neither MNC2 nor MNE6 recognize a MUC1 or MUC1* specific linear epitope. The SDIX polyclonal antibody recognizes HCT-MUC1* but not full-length MUC1 and VU4H5 only recognizes full-length MUC1. These same antibodies were also tested for their ability to work in Western blots of two breast cancer cell lines 1500, aka Zr-75-1, and T47D cells and show the same binding pattern (FIG. 71E-71H).

[0616] Antibodies that were raised against the PSMGFR peptide were tested the same way in Western blots (FIG. 72A-72P). As can be seen, antibodies 25E6 and 18B4 recognize linear epitopes but 20A10, 3C2B1, 5C6F3, 18G12 and 28F9 do not, indicating that they bind to a conformational epitope. Antibodies that were raised against the N+20/C−27 peptide were tested the same way in Western blots (FIG. 73A-73J). As can be seen, antibodies 31A1 and 32C1 recognize linear epitopes. Antibodies 1E4 and 45C11 may recognize a conformational epitope. Antibodies that were raised against the N+9/C−9 peptide were tested the same way in Western blots (FIG. 74A-74H). As can be seen, none of these antibodies recognize linear MUC1 or MUC1* specific epitopes. These antibodies may recognize a conformational epitope. However, an alternative interpretation is that the lack of binding in a Western blot means that they do not specifically recognize MUC1 or a MUC1 cleavage product or that the concentration used in this assay was insufficient.

[0617] Recognition of a MUC1 Cleavage Product after Cleavage by MMP9

[0618] We previously demonstrated that MNC2 recognizes a MUC1* that is generated when full-length MUC1 is cleaved by matrix metalloprotease 9, MMP9 (FIG. 37). MMP9 is expressed by tumor tissues and is a predictor of poor prognosis for breast cancers (vant Veer et al 2002; Dufour et al 2011). MMP9 has also been implicated in metastasis (Owyong et al 2019). Recall also that MNC2 competitively inhibits the binding of onco-embryonic growth factor NME7_{AB} to the MUC1* extra cellular domain (FIG. 3). Therefore, it follows that onco-embryonic growth factor, which activates growth and survival functions of MUC1*, also recognizes a MUC1* generated by cleavage by MMP9. It then follows that the most cancer specific antibodies are those that recognize a conformational epitope formed when MUC1 is cleaved to MUC1* by MMP9.

[0619] Antibodies generated by immunization with PSMGFR, N+20/C−27, or N+9/C−9 were tested for their ability to recognize MUC1 after it is cleaved by MMP9. To do this, we transfected HCT-116, a MUC1 negative colon cancer cell line, with full-length MUC1 and isolated a single cell clone that is cleavage resistant; this cleavage resistant cell line is called HCT-MUC1-18. To HCT-MUC1-18 cells was added either a catalytically active MMP9 or MMP2. The enzymes, added over a range of concentrations, were incubated with the cells for 24 hours. The resultant cells were then incubated with the various antibodies and analyzed by FACS to determine which bound to a MUC1 cleavage product produced by cleavage by MMP9 (FIG. 75A-75N). Note that the first bar of each graph shows that none of the antibodies binds to full-length MUC1 in the absence of cleavage. Each bar graph is labeled with both the name of the antibody used in that assay and its cognate epitope. The order of the graphs from right to left corresponds to the distance from the cell surface of the antibody's cognate epitope. The antibodies that bind to the more C-terminal epitopes within PSMGFR peptide, such as 20A10 and 25E6, showed the most increased binding to a MUC1 cleavage product after cleavage by MMP9 but not MMP2. Antibody 45C11, which binds to the SNIKFRPGSVV epitope, which is outside of the PSMGFR portion of MUC1, does not recognize a MUC1 cleavage product after cleavage by MMP9 or MMP2 (FIG. 75K). Similarly, antibodies 8A9 and 17H6 bind to the VQLTLAFRE epitope, which is also outside of the PSMGFR sequence, and they do not bind to a MUC1 cleaved by MMP9 or MMP2. This result is consistent with the idea that MMP9 cleaves MUC1 such that the extra cellular domain of the remaining transmembrane cleavage product comprises essentially the amino acids of the PSMGFR peptide. For the greatest degree of cancer specificity, the antibody should recognize a conformational epitope of a MUC1 cleavage product created when MUC1 is cleaved by MMP9. Of the antibodies shown in FIG. 75A-75N, only 20A10 recognizes the MUC1 cleavage product produced by cleavage by MMP9 and also does not work in a Western blot, indicating it recognizes a conformational epitope, as do MNC2 and MNE6. Cleavage and release of the massive tandem repeat domain of MUC1 unmasks the ectopic binding site on MUC1*; linear epitopes will be unmasked in addition to conformational epitopes.

[0620] FACS Analysis of Binding to a Panel of Cancer Cell Lines

[0621] Fluorescence Activated Cell Sorting, FACS, was performed on reference antibodies as well as new antibodies of the invention. FACS analyses of reference antibodies MNC2, “C2”, and VU4H5 binding to either the MUC1-negative cell line HCT-116, HCTs transfected with MUC1*, “HCT-MUC1*”, a cleavage resistant single cell clone of HCTs transfected with MUC1 full-length, “HCT-MUC1-18”, and MNC2 binding to breast cancer cells line T47D or breast cancer cell line 1500 also known as ZR-75-1, was performed (FIG. 76A-76J). This analysis shows that MNC2 binds to an ectopic binding site on the extra cellular domain of MUC1*, which is only available after cleavage and release of the bulk of the extra cellular domain comprising the tandem repeat domain. VU4H5 binds to hundreds of repeating epitopes in the tandem repeat domain of full-length MUC1 and does not bind to MUC1*. Although we know that cancer cell lines express both full-length MUC1 and MUC1*, antibodies against full-length MUC1 have, as yet, been shown to have no therapeutic value. Stimuvax, ImMucin, IMGN242, SAR566658, PankoMab and AS1402 were all antibodies that bound to full-length MUC1 and all failed to show efficacy in clinical trials. MUC1*, and not full-length MUC1, is a potent growth factor receptor that mediates the growth of cancer cells (Mahanta et al 2008) and their resistance to chemotherapy agents (Fessler et al 2009). These studies showed that full-length MUC1 had no tumor promoting activity. Further, IHC studies show that as tumor stage increases, the amount of MUC1* increases as the amount of full-length MUC1 decreases (FIG. 54). In fact, studies with tissue micro arrays of breast cancers show that nearly 30% of breast cancer specimens had no detectable full-length MUC1, compared to only 5% that were negative for MUC1* (FIG. 10-11). A point to consider for therapeutics that target full-length MUC1 is that if cells expressing full-length MUC1 are eliminated, that would simply enrich the tumor population for the more virulent MUC1* growth factor receptor expressing cells, which would make the cancers worse.

[0622] Reference antibody MNC2, “C2”, was analyzed by FACS for its ability to bind to a panel of cancer cell lines that are all MUC1* positive, with the exception of MDA-MB-231, which expresses MUC1 and MUC1* at a level that is so low that it is often used as a negative control (FIG. 77A-77N). The panel of cancer cells that was probed with MNC2 included T47D and 1500 breast cancer cells, NCI-H292 and NCI-H1975 lung cancer cells, SKOV-3 ovarian cancer cells, HPAF-II and Capan-1 pancreatic cancer cells, DU145 prostate cancer cells, and MDA-MB-231, breast cancer cells, which are nearly MUC1 and MUC1* negative. MNC2 robustly recognized a wide range of cancer cell lines. We note that although MNC2 recognized HPAF-II pancreatic cells, it did not recognize another pancreatic cell line, Capan-1, as well. Similarly, MNC2 did not recognize prostate cancer cell line DU145 very well. In IHC tissue studies, we found that MNC2 recognized about 57% of prostate cancer tissues and 78% of pancreatic tissues, albeit with significant tumor heterogeneity.

[0623] FIG. 78A-78C shows a color coded schematic of the PSMGFR sequence that has been extended or deleted at both the N- and C-termini. Antibodies of the invention were tested against this subset of peptides to further refine the epitopes to which each antibody binds or the critical amino acids within the epitope to which each antibody binds. FIG. 78A is an aligned schematic of the various subsets of peptides. FIG. 78B lists the antibodies that bind to each of the color coded sequences. FIG. 78C lists the cancer cell lines that each antibody recognizes.

[0624] FIGS. 80-87 show graphs of FACS analyses wherein antibodies of the invention are compared for their ability to specifically recognize different types of cancer cells. Percent cells recognized as well as the Mean Fluorescence Intensity, MFI, was measured. Considering only these FACS experiments, they show that only antibodies that recognize the PSMGFR peptide are able to recognize cancer cell lines. Antibodies that bind to epitopes outside of the PSMGFR sequence do not specifically recognize these cancer cell lines.

[0625] IHC Tissue Studies of Normal Versus Cancerous Tissues to Determine True Cancer Specificity

[0626] Immunohistochemistry, IHC, tissue studies of tissue micro arrays, “TMAs”, are a more stringent test of the cancer specificity of antibodies than FACS analysis of a single cancer cell line. Cancer cell lines are a single cell from a single patient that have been expanded in a lab for decades. Cell lines are limited in that they are not representative of a cross section of the human population. Further, after culturing the cell line in vitro for decades it may no longer look like the original cell. Also, there are no real normal cell lines for comparison, as they have to be made immortal. Tissue studies are more informative because each tissue micro array comprises tissues from multiple donors and the cells are in their natural environment, without years of culturing under non-physiologic conditions. Additionally, tissues provide information regarding tumor heterogeneity as well as information regarding normal patterns of expression. Each antibody of the invention was used to probe a normal tissue micro array, FDA Normal Array 1021. In addition the antibody was also used to probe a panel of cancerous tissue arrays. In some cases, antibodies that showed strong staining of normal tissues, especially of critical organs such as heart or lung, were tested on a limited number of cancerous tissue arrays, since their cross reactivity to normal tissues eliminated them from consideration as anti-cancer therapeutics.

[0627] FIGS. 113-200 show photographs of the IHC staining of normal TMAs versus cancerous TMAs for each antibody of the invention.

[0628] FIG. 113-120 show photographs of tissues studies probed with antibody 20A10. Recall that 20A10 binds to the PSMGFR peptide, binds to the N−10 peptide, but does not bind to the C−10 peptide. Refined epitope mapping shows that like MNC2 and MNE6, the binding of 20A10 depends on amino acids FPFS being present in the PSMGFR peptide. 20A10 binds to the most membrane proximal part of the MUC1* extra cellular domain. An overview of FDA Normal Tissue Array 1021 is shown in FIG. 113. FIG. 114A-114X show that there is little to no cross reactivity of 20A10 for normal tissues. We note that MNC2, MNE6 and 20A10 all react with the MUC1* that is expressed on the luminal edge of the terminal breast ducts, luminal edge of the fallopian tubes, luminal edge of about 10% of the distal collecting ducts of normal kidney, and luminal edge of ureter. Because the staining is strictly limited to the luminal edge of a subset of ducts and glands, these antibodies are considered to be safe as therapeutics as the inside of ducts and glands are protected from large entities carried by blood, such as antibodies or CAR T cells. Importantly, MNC2, MNE6 and 20A10 show no staining of critical organs, such as heart, lung and brain. In stark contrast, 20A10, like MNC2 and MNE6, robustly binds to cancerous tissues. 20A10 stains nearly all specimens of the BR1141 breast cancer array (FIG. 115-116). In addition to robust staining of the breast cancer tissue, the staining is membrane staining, indicating that 20A10 recognizes an extra cellular portion of MUC1*, which is critical for an effective antibody-based anti-cancer therapeutic. 20A10 also showed robust and membranous staining of pancreatic cancer tissues (FIG. 117-118) and esophageal cancer tissues (FIG. 119-120). In summary, 20A10 shows great cancer specificity and as an anti-cancer therapeutic offers a large therapeutic window because of the vast difference between staining of normal tissues and cancerous tissues, in terms of the location and intensity of staining.

[0629] Anti-MUC1* antibody 3C2B1 is an antibody that like MNC2, MNE6 and 20A10, binds to N−10 but not to C−10. More refined epitope mapping shows that like these three other highly cancer-specific antibodies, 3C2B1 requires the FPFS sequence for binding to a MUC1* extra cellular domain peptide. FIG. 121 shows the photograph of the FDA normal array 1021. FIG. 122A-122X shows photographs of specific tissues from FDA normal tissue array 1021 stained with the anti-PSMGFR antibody 3C2B1 at 20 ug/mL. As can be seen, there is no binding of 3C2B1 to any critical normal organs. FIG. 123 shows photograph of pancreatic cancer tissue array PA1003 stained with the anti-PSMGFR antibody 3C2B1 at 1-20 ug/mL. FIG. 124 shows photographs of specific tissues from pancreatic cancer tissue array PA1003 stained with the anti-PSMGFR antibody 3C2B1 at 20 ug/mL. FIG. 125 shows photograph of breast cancer tissue array 1141 stained with the anti-PSMGFR antibody 3C2B1 at 20 ug/mL. FIG. 126A-126F shows magnified photographs of specific tissues from breast cancer tissue array 1141 stained with the anti-PSMGFR antibody 3C2B1 at 20 ug/mL. As can be seen in the figure, 3C2B1 robustly stains breast cancer tissues.

[0630] Anti-MUC1* antibody 5C6F3 binds to the N−10 peptide, does bind to the C−10 peptide, although binding is reduced somewhat. Its cognate epitope comprises all or some of the sequence SVSDV (SEQ ID NO:1751). FIG. 127 shows photograph of FDA normal tissue array 1021 stained with the anti-PSMGFR antibody 5C6F3 at 1 ug/mL. FIG. 128 shows photographs of specific tissues from FDA normal tissue array 1021 stained with the anti-PSMGFR antibody 5C6F3 at 1 ug/mL. FIG. 129 shows photograph of pancreatic cancer tissue array PA1003 stained with the anti-PSMGFR antibody 5C6F3 at 1-20 ug/mL. FIG. 130 shows photographs of specific tissues from pancreatic cancer tissue array PA1003 stained with the anti-PSMGFR antibody 5C6F3 at 1 ug/mL. FIG. 131 shows photograph of breast cancer tissue array 1141 stained with the anti-PSMGFR antibody 5C6F3 at 1 ug/mL. FIG. 132 shows photographs of specific tissues from breast cancer tissue array 1141 stained with the anti-PSMGFR antibody 5C6F3 at 1 ug/mL. As can be seen in the FIG. 5C6F3 is a high affinity antibody that has great cancer-specificity and with the exception of adrenal, which may be an artefact of that tissue, did not show binding to normal tissues.

[0631] In contrast to 20A10, which binds to the most membrane proximal part of the MUC1* extra cellular domain, 18B4 binds within the GTINVHDVET sequence, which is the most distal part of the PSMGFR sequence. Unlike antibodies MNC2, MNE6 or 20A10, 18B4 cannot bind to the N−10 peptide but does bind to the C−10 peptide. FIG. 133-134 show the binding of antibody 18B4 to normal tissues. In contrast to 20A10, antibody 18B4 shows strong binding to a wide range of normal tissues (FIG. 134), including lung (FIG. 134K). FIG. 135-138 show 18B4 staining of breast cancer tissues and esophageal cancer tissues. Because of the strong binding of 18B4 to normal tissues, there is less cancer specificity to this antibody.

[0632] FIG. 139-144 show the binding of PSMGFR antibody 18G12 to normal tissues, breast cancer tissues and esophageal cancer tissues. 18G12 is able to bind to the N−10 peptide, but is also able to bind to the C−10 peptide. 18G12 binds to the ASRYNLT epitope within the PSMGFR peptide. Antibody 18G12 binds to the luminal edge of many of the collecting ducts of normal kidney (FIG. 140D), binds to normal heart muscle (FIG. 140I) as well as to normal skeletal muscle (FIG. 140X). However, there is a clear cancer specificity in that 18G12 binds much more strongly to cancerous tissues than to the few normal tissues. In addition, 18G12 stains the entire cancerous tissues rather than just a luminal edge here or there. FIG. 141-146 show 18G12 staining of breast cancer tissues, pancreatic cancer tissues and esophageal cancerous tissues. The contrast between the staining of the normal tissues and the cancer tissues clearly demonstrates cancer specificity.

[0633] FIG. 147-148 show the binding of PSMGFR antibody 25E6 to normal tissues. 25E6 is able to bind to the N−10 peptide, but is also able to bind to the C−10 peptide. 25E6 binds to the ASRYNLT epitope within the PSMGFR peptide. Like MNC2, MNE6 and 20A10, antibody 25E6 binds to the luminal edge of terminal breast ducts, luminal edge of fallopian tubes, to the luminal edge of a subset of the distal collecting ducts of normal kidney and to the luminal edge of ureter. Unlike MNC2, MNE6 and 20A10, 25E6 binds, albeit very weakly, to normal heart muscle (FIG. 148I) as well as to normal skeletal muscle (FIG. 148X). However, there is a clear cancer specificity in that 25E6 binds much more strongly to cancerous tissues than to the few normal tissues. In addition, 25E6 stains the entire cancerous tissues rather than just a luminal edge here or there. FIG. 149-152 show 25E6 staining of breast cancer tissues and pancreatic cancerous tissues. The contrast between the staining of the normal tissues and the cancer tissues clearly demonstrates cancer specificity.

[0634] FIG. 153-156 show the binding of PSMGFR antibody 28F9 to normal tissues and breast cancer tissues. 28F9 is able to bind to the N−10 peptide, but is also able to bind to the C−10 peptide. 28F9 binds to the ASRYNLT epitope within the PSMGFR peptide. Like MNC2, MNE6 and 20A10, antibody 25E6 binds to the luminal edge of terminal breast ducts, luminal edge of fallopian tubes, to the luminal edge of a subset of the distal collecting ducts of normal kidney and to the luminal edge of ureter. FIG. 155-156 show 28F9 staining of breast cancer tissues.

[0635] FIG. 157-158 show the binding of the N+20/C−27 antibody 1E4 to normal tissues. 1E4 is able to bind to the N−10 peptide but also is able to bind to the C−10 peptide. 1E4 binds to the QFNQYKTEA sequence which is within the PSMGFR sequence. Examination of the entire normal tissue micro array (FIG. 157A) shows that antibody 1E4 binds to many normal tissues, including brain, cerebellum, all 3 liver specimens, pancreas, parathyroid, spinal cord and skeletal muscle. Magnified images show that 1E4 stains heart (FIG. 158I) as well. 1E4 staining of a breast cancer array (FIG. 159-160) shows that there is some cancer specificity.

[0636] FIG. 161-162 show the binding of the N+20/C−27 antibody 29H1 to normal tissues. 29H1 binds within the GTINVHDVET sequence, which is the most distal part of the PSMGFR sequence. Unlike antibodies MNC2, MNE6 or 20A10, 29H1 cannot bind to the N−10 peptide but does bind to the C−10 peptide. Examination of the entire normal tissue micro array (FIG. 157A) shows that even at concentration as low as 0.5 ug/mL, antibody 29H1 strongly stains a wide range of normal tissues, including brain, heart, liver and lung. 29H1 staining of a breast cancer array (FIG. 163-164) and staining of a pancreatic cancer tissue array (FIG. 165-166) shows that there is no cancer specificity.

[0637] Antibody 31A1 is similar to 29H1 in that they are both N+20/C−27 antibodies that bind within the GTINVHDVET (SEQ ID NO:1746) sequence, which is the most distal part of the PSMGFR sequence. Unlike antibodies MNC2, MNE6 or 20A10, neither 31A1 nor 29H1 can bind to the N−10 peptide but do bind to the C−10 peptide. Examination of the entire normal tissue micro array and the magnified images (FIG. 167-168) shows that even at concentration as low as 0.5 ug/mL, antibody 31A1 strongly stains a wide range of normal tissues, including brain, heart, lung, spleen, bone marrow, and skeletal muscle. 31A1 was used to stain a breast cancer array, (FIG. 169-170). 31A1 was used over a range of concentrations to stain a pancreatic cancer tissue array (FIG. 171-172). These figure shows that 31A1 has insufficient cancer specificity.

[0638] Antibody 32C1 is similar to 29H1 and 31A1 in that they are all N+20/C−27 antibodies that bind within the GTINVHDVET sequence, which is the most distal part of the PSMGFR sequence. Unlike antibodies MNC2, MNE6 or 20A10, none of 32C1, 31A1 or 29H1 can bind to the N−10 peptide but all do bind to the C−10 peptide. Examination of the entire normal tissue micro array and the magnified images (FIG. 173-174) shows that even at concentration as low as 0.25 ug/mL, antibody 32C1 strongly stains a wide range of normal tissues, including brain, heart, lung, liver, spleen and bone marrow. 32C1 was also used to probe a breast cancer array (FIG. 175-176). 32C1 was used over a range of concentrations to stain an esophageal cancer tissue array (FIG. 177-178). Taken together, these figures show that 32C1 has insufficient cancer specificity.

[0639] Antibody 45C11 is an N+20/C−27 antibody that binds to epitope SNIKFRPGSVV (SEQ ID NO:1744) that is 20 amino acids outside of the PSMGFR sequence at the N-terminal end. 45C11 does not bind to the N−10 peptide. Normal tissue array FDA 1021 was stained with 45C11 at 12.5 ug/mL (FIG. 179-180). As can be seen in the figures, 45C11 shows strong binding to many normal tissues, including brain, heart, lung, liver, spleen, skeletal muscle and bone marrow. 45C11 was used over a range of concentrations to stain a breast cancer tissue array (FIG. 181-182). 45C11 was also used to stain a pancreatic cancer tissue array (FIG. 183-184). Taken together, these figures show that 45C11 has no cancer specificity.

[0640] Antibody 3C5 is an N+9/C−9 antibody that binds to epitope GTINVHDVET. Like the other antibodies that bind to this epitope such as 32C1, 29H1 and 31A1, they bind to the most distal, that is to say the most N-terminal, part of the PSMGFR sequence. Unlike antibodies MNC2, MNE6 or 20A10, none of 3C5, 32C1, 31A1 or 29H1 can bind to the N−10 peptide but all do bind to the C−10 peptide. Examination of the entire normal tissue micro array, where 3C5 was used at 10 ug/mL, and the magnified images (FIG. 185-186) shows that antibody 3C5 strongly stains some normal tissues, including brain, heart, adrenal gland and bone marrow. 3C5 was also used to probe a pancreatic cancer array at 10 ug/mL, (FIG. 187-188). Taken together, these figures show that 3C5 has no cancer specificity.

[0641] Antibody 8A9 is an N+9/C−9 antibody that binds to epitope VQLTLAFRE which is outside of the PSMGFR sequence. Antibody 8A9 cannot bind to the N−10 peptide. Normal tissue array FDA 1021 was stained with 8A9 (FIG. 189-190). As can be seen in the figures, like antibody 45C11, which also binds an epitope that is N-terminal beyond the PSMGFR sequence, antibody 8A9 shows strong binding to many normal tissues, including adrenal, brain, heart, lung, liver, spleen, skeletal muscle and bone marrow. A pancreatic cancer array stained with antibody 8A9 showed weak binding to a subset of pancreatic cancer tissues (FIG. 191-192). Taken together, these figures show that 8A9 has no cancer specificity.

[0642] Antibody 17H6 is an N+9/C−9 antibody that binds to epitope VQLTLAFRE, which is outside of the PSMGFR sequence. 17H6 was used to stain normal tissue array 1021. Examination of the entire normal tissue micro array and the magnified images (FIG. 193-194) shows that antibody 17H6 stains some normal tissues, including brain, heart, adrenal gland, bone marrow and skeletal muscle. 17H6 was used to probe a pancreatic cancer array and showed weak binding to most pancreatic cancer tissues (FIG. 195-196). However, the binding of 17H6 to several normal tissues of critical organs shows that 17H6 has little cancer specificity.

[0643] Antibody 39H5 is an N+9/C−9 antibody that binds weakly to the intact PSMGFR peptide but not significantly to any of the subset peptides. 39H5 may bind to the GTINVHDVET, which is the most distal part of the PSMGFR sequence. Examination of the entire normal tissue micro array and the magnified images (FIG. 197-198) shows that antibody 39H5 stains some normal tissues, including brain, heart, liver and bone marrow. 39H5 was used to probe a pancreatic cancer array, (FIG. 199-200). Although 39H5 stained a good percentage of the pancreatic cancer specimens, considering the normal tissues that 39H5 stained, 39H5 has little cancer specificity.

[0644] Summary of FACS Analysis

[0645] Determining the cancer specificity of antibodies using cell lines is difficult, as these cells were obtained from a single patient's tumor decades ago, and then propagated in culture for decades. Even if the patient's tumor was at one point heterogeneous, the decades of in vitro culture have essentially made the cell line a single cell clone. Antibodies of the invention were assayed by FACS to determine if they bound to MUC1 or MUC1* positive cancer cells but not MUC1 negative cells. The results of these experiments are shown in FIGS. 76-87. What is very clear is that antibodies that bind to epitopes of the MUC1 sequence that are outside of and N-terminal to PSMGFR sequence show no cancer specificity. Referring now to the readings of Mean Fluorescence Intensity (MFI) it appears that antibodies with cognate epitopes at the very N-terminus of the PSMGFR sequence, such as those that bind to an epitope within GTINVHDVET, show far less cancer specificity than the antibodies that recognize more C-terminal epitopes. For example, antibody MNC2 that will not bind to the C−10 peptide binds strongly to nearly every MUC1* positive cell line (FIG. 76-77). However, closer examination reveals that MNC2 binds lung cancer line NCI-H1975 much more strongly than NCI-H292. Similarly, MNC2 binds pancreatic cell line HPAF-II much better than Capan-1 or prostate cancer line DU145. PCR measurements show that the expression levels of cleavage enzymes varies greatly across a panel of cancer cell lines (FIG. 43 and FIG. 44). The fold of the MUC1* extra cellular domain can vary greatly depending on which cleavage enzyme clips it, which likely accounts for differences between cancer cell lines that a single antibody recognizes. This variation in antibody recognition of various cell lines, even within a cancer sub-type is apparent in the figures.

[0646] Summary of IHC data

[0647] IHC analysis of real tissues, including both normal and cancerous tissues, is more informative than the study of cultured cell lines, as is necessary in FACS analysis. Each antibody was first tested over a range of concentrations to determine optimal concentration. Antibody concentration was increased until the stroma also picked up stain, which indicates non-specific background binding. The optimal concentration for that particular antibody was then deemed to be just below the concentration at which the antibody stained the stroma.

[0648] An overview of the IHC tissue studies is shown in FIG. 88-112. Here, we focused on the binding of antibodies to critical organ tissues, since binding to certain normal tissues would likely eliminate therapeutic use of that antibody. In these figures, the antibodies were grouped according to their cognate epitope. What is evident from the tissue studies is that the further the epitope is from the cell membrane, the more it binds to normal MUC1 on normal tissues. For example, binding to normal heart tissue by representative antibodies that recognize a specific epitope are shown in FIG. 88A-88L. As the figure illustrates, antibodies that bind to epitopes that are N-terminal to the PSMGFR peptide such as epitope within SNIKFRPGSVV or VQLTLAFRE show such strong binding to normal heart that they could not be used in therapeutics. In addition, antibodies that bind to the more N-terminal portion of PSMGFR, such as 29H1, also show binding to normal heart. The antibodies with the least binding to normal tissues and the strongest binding to cancerous tissues bind to epitopes within the FPFS or PFPFSAQSGA. Some antibodies that bind to epitopes within the ASRYNLT portion may also be suitable as therapeutics. These antibodies and others that recognize the same epitopes are desirable as anti-cancer therapeutics because they have a large therapeutic window, meaning that because of the low binding to normal tissues, and low side effects, patients can be dosed with antibody levels high enough to effectively kill the tumor cells. More detailed photographs of antibodies of the invention binding, or not binding, to other critical tissues are also shown. FIGS. 89-94 show magnified photographs of each antibody binding to normal heart tissue, where the antibodies have been categorized according to which epitope they bind. FIGS. 95-100 show magnified photographs of each antibody binding to normal liver tissue, where the antibodies have been categorized according to which epitope they bind. FIGS. 101-106 show magnified photographs of each antibody binding to normal lung tissue, where the antibodies have been categorized according to which epitope they bind. FIGS. 107-112 show magnified photographs of each antibody binding to normal bone marrow, where the antibodies have been categorized according to which epitope they bind.

[0649] The results of the IHC studies (FIG. 88-FIG. 200) are summarized in Table 3.

TABLE 3
Summary of Antibody Cross-Reactivity to Normal Tissues

| Antibody | | | | | | BONE | | SKELETAL | |
|---|---|---|---|---|---|---|---|---|---|
| Name | HEART | BRAIN | LUNG | LIVER | SPLEEN | MARROW | KIDNEY | MUSCLE | ADRENAL |
| PSMGFR | | | | | | | | | |
| MNC2 | | | | | | | | | |
| MNE6 | | | | | | | | | |
| 20A10 | | | | | | | | | |
| 25E6 | ~+ | | | | | | | ~+ | |
| 18B4 | | | +++ | | | + | | | |
| 18G12 | ++ | | | | | | +++ | +++ | |
| 28F9 | | | | | | | | ~+ | |
| 3C2B1 | | | | | | | | | |
| 5C6F3 | | | + | | | ~+ | ++ | | ++++ |
| N+20/ | | | | | | | | | |
| C−27 | | | | | | | | | |
| 1E4 | ++ | ++ | | +++ | | ~+ | | +++ | |
| 31A1 | ++ | +++ | ++ | | ++++ | ++++ | | + | |
| 32C1 | +++ | +++ | +++ | ++ | +++ | ++++ | | | ++ |
| 29H1 | + | ++++ | ++++ | ++++ | ++ | | | | ++++ |
| 45C11 | +++++ | ++++ | ++ | +++++ | ++ | +++ | + | +++++ | + |
| N+9/ | | | | | | | | | |
| C−9 | | | | | | | | | |
| 8A9 | +++++ | +++++ | +++ | +++++ | ++++ | ++++ | + | ++++ | +++ |
| 17H6 | +++ | ++++ | | | | + | | | ++ |
| 3C5 | +++ | ++++ | | + | | ++++ | | | +++ |
| 39H5 | ++++ | +++++ | + | +++ | +++ | ++++ | | | ++++ |

[0650] As can be clearly seen in the table, the further away from the cell membrane that the antibody binds, the more non-specific binding there is. Although these antibodies were generated by immunizing with the PSMGFR peptide, N+20/C−27 peptide or the C+9/C−9 peptide, some of the antibodies generated by immunizing with an extended peptide still bind within the PSMGFR sequence, see FIGS. 63-69 for the details of epitope binding for each antibody. Some binding to normal tissues can be tolerated if the antibody is incorporated into an appropriate therapeutic format. For example, cellular therapies, such as CAR T, are carried by the blood and meet with physiological barriers including lamina propia and blood-brain barrier that limits the cell's access to luminal edge of ducts and glands. Other antibodies that bind much more strongly to cancerous tissues but do show some binding to normal tissues could also be safe and useful therapeutics if administered locally or if cancer-specificity is enhanced by incorporating into a bi-specific antibody. However, widespread antibody binding to many normal organs or to essential organs for which there is no physical barrier could be lethal to the patient.

[0651] The most cancer-specific antibodies with little to no binding to normal tissues are MNC2, MNE6, 20A10, 3C2B1 and 25E6. An ideal antibody therapeutic is one that stains no normal tissues but robustly stains cancer cells. Unfortunately, cancer antigens are also expressed on normal tissues, so zero staining of normal tissue is not possible. The aim is to identify an antibody that binds much more strongly to tumor tissue than normal tissue and that either binds to non-critical normal tissues or binds to them in a way that would not be physiologically possible in an intact organ. For example, CAR T cells are carried by the blood and the lamina propia is a barrier to their getting to the luminal edge of a duct or gland. Similarly, the blood brain barrier prevents the passage of large molecules like antibodies from the blood into the brain. The usefulness of an antibody as a therapeutic also depends on the format of the therapeutic. As mentioned, cell based therapies have natural barriers that prevent the CAR T cells from getting to some normal tissues. Antibody Drug Conjugate (ADC) based therapies sometimes depend on a local, cancer-specific molecule to activate the toxin attached to the antibody, minimizing the importance of whether or not a naked antibody binds to some normal tissue. In another example, antibodies and antibody-based therapeutics can be administered locally, including intraperitoneally, to maximize the effect on tumor cells while minimizing their effect on normal tissues. In yet another example, an antibody that is not purely cancer-specific can be made more cancer-specific if it is incorporated into a bi-specific antibody where a first side of the molecule binds to a first cancer antigen and the second side of the molecule binds to a second antigen that may be a tissue specific antigen, another cancer specific antigen or even an antigen on a cell such as a T cell, which are called BiTES, bispecific T cell engagers. In yet another example, the less cancer-specific antibody can be incorporated into a cell-based therapy where its expression is induced only after the cell recognizes a tumor. In one aspect, a CAR T cell can express a first CAR that recognizes a first antigen which recognition induces expression of a second antibody, or CAR incorporating the second antibody. In one aspect the cell expresses a CAR directed by an antibody fragment that is cancer-specific and a second antibody or CAR expressing the second antibody is induced to be expressed in an NFAT inducible system. In one aspect the nucleic acids encoding the second antibody or second CAR are down stream of NFAT response elements. The NFAT inducible gene may be inserted into a Foxp3 enhancer or promoter.

[0652] FIG. 202 shows photographs of pancreatic cancer tissues, each from a different patient. As can be seen, the staining pattern of 1E4 is very different from that of 18B4 and the polyclonal antibody SDIX. 18B4 and SDIX antibodies were generated by immunizing animals with the same peptide (PSMGFR), while the 1E4 antibody was generated from immunization with a different peptide (N+20). FIGS. 203-207 show magnified images of selected tissues from this array to highlight the differences between these antibodies. FIG. 208 compares the staining of polyclonal antibody SDIX to monoclonal antibody 20A10, which were both generated from immunization with the PSMGFR peptide. Also shown is the difference in staining pattern for antibody 29H1 which was generated by immunization with an N+20 peptide. Although the antibody staining is lighter, antibody 29H1 recognizes more pancreatic cancer tissue specimens than the SDIX polyclonal or 20A10. FIG. 209 shows that esophageal cancers are better recognized by antibodies that bind to a MUC1* peptide with an extended N-terminus, such as antibody 29H1 and antibody 31A1. Similarly, FIG. 210 shows that prostate cancers are better recognized by antibodies that bind to a MUC1* peptide with an extended N-terminus, such as antibody 29H1.

[0653] Below Table 4 shows a summary of the test criteria to determine the cancer-specificity of the various monoclonal antibodies.

TABLE 4

| | Cancer-Specificity Test Criteria | | | | | | | |
|---|---|---|---|---|---|---|---|---|
| | | | | | | 5 | | |
| | | | | | 4 | Recognizes | | |
| | | | 2 | 3 | Does | MUC1 | | |
| | | | Does | Displaces | not | after | 6 | 7 |
| | | 1 | not | NME7_{AB} | recognize | cleavage | Cancer | Cancer |
| | Binds | Binds | bind | from | linear | by | selective | selective |
| mAb Name | PSMGFR | N-10 | C-10 | MUC1* | epitope | MMP9 | by FACS | by IHC |

NNIKTRPGSVVVQLTLAFREGTINVHDVETQFNQYKTEAASRYNLTISDSVSFSPF
PFSAQSGA

| | | | | | | | | |
|---|---|---|---|---|---|---|---|---|
| FPFS | | | | | | | | |
| MNC2 | [symbol] | [symbol] | [symbol] | [symbol] | [symbol] | [symbol] | [symbol] | [symbol] [symbol] [symbol] |
| MNE6 | [symbol] | [symbol] | [symbol] | [symbol] | [symbol] | [symbol] | [symbol] | [symbol] [symbol] [symbol] |
| 20A10 | [symbol] | [symbol] | [symbol] | [symbol] | [symbol] | [symbol] | [symbol] | [symbol] [symbol] [symbol] |
| 3C2B1 | [symbol] | [symbol] | [symbol] | [symbol] | [symbol] | [symbol] | [symbol] | [symbol] [symbol] [symbol] |
| SVSDV | | | | | | | | |
| 5C6F3 | [symbol] | [symbol] | ~ [symbol] | [symbol] | [symbol] | [symbol] | [symbol] | [symbol] [symbol] |
| ASRYNLT | | | | | | | | |
| 25E6 | [symbol] | [symbol] | [symbol] | [symbol] | [symbol] | [symbol] | [symbol] | [symbol] [symbol] |
| MNC3 | [symbol] | ~√ | [symbol] | [symbol] | [symbol] | [symbol] | ND | [symbol] |
| 18G12 | [symbol] | [symbol] | [symbol] | [symbol] | [symbol] | [symbol] | ~√ | [symbol] |
| 28F9 | [symbol] | [symbol] | [symbol] | [symbol] | [symbol] | [symbol] | ~√ | [symbol] |
| QFNQYKTEA | | | | | | | | |
| 1E4 | [symbol] | [symbol] | [symbol] | [symbol] | [symbol] | [symbol] | ~√ | [symbol] |
| GTINVHDVET | | | | | | | | |
| 18B4 | [symbol] | [symbol] | [symbol] | ~√ | [symbol] | [symbol] | [symbol] | [symbol] |
| 29H1 | [symbol] | [symbol] | [symbol] | ~√ | [symbol] | [symbol] | [symbol] | [symbol] |
| 31A1 | [symbol] | [symbol] | [symbol] | [symbol] | [symbol] | [symbol] | [symbol] | [symbol] |
| 32C1 | [symbol] | [symbol] | [symbol] | ~√ | [symbol] | [symbol] | [symbol] | [symbol] |
| 39H5 | [symbol] | [symbol] | [symbol] | ~√ | [symbol] | [symbol] | [symbol] | [symbol] |
| 3C5 | [symbol] | [symbol] | [symbol] | [symbol] | [symbol] | [symbol] | [symbol] | [symbol] [symbol] |
| VQLTLAFRE | | | | | | | | |
| 8A9 | [symbol] | [symbol] | [symbol] | [symbol] | [symbol] | [symbol] | [symbol] | [symbol] [symbol] |
| 17H6 | [symbol] | [symbol] | [symbol] | [symbol] | [symbol] | [symbol] | [symbol] | [symbol] |
| SNIKFRPGSVV | | | | | | | | |

[0654] To summarize, we found that antibodies that bound to sequences that are N-terminal to the PSMGFR sequence had no cancer-specificity. Further, the closer to the cell membrane that the antibody binds, the more cancer-specific is the antibody. More importantly, test criteria 1-4 or even 1-5 provide a set of rapid, multiplexed and inexpensive tests that can be performed on hundreds or thousands of impure hybridoma clone supernatants to identify antibodies that are highly selective for cancer-specific forms of MUC1*.

[0655] Satisfies Test Criteria

[0656] In a preferred embodiment an antibody is chosen for the treatment, prevention or diagnosis of cancer based on satisfying four (4) of the seven (7) criteria set out in Table 4. In a more preferred embodiment an antibody is chosen for the treatment, prevention or diagnosis of cancer based on satisfying five (5) of the seven (7) criteria set out in Table 4. In a yet more preferred embodiment an antibody is chosen for the treatment, prevention or diagnosis of cancer based on satisfying six (6) of the seven (7) criteria set out in Table 4. In a more preferred embodiment an antibody is chosen for the treatment, prevention or diagnosis of cancer based on satisfying all seven (7) of the criteria set out in Table 4.

[0657] Bind to N−10

[0658] We have demonstrated that a MUC1 transmembrane protein, devoid of tandem repeats and having an extra cellular domain of 45 amino acids of PSMGFR sequence, is sufficient to function as a growth factor receptor and confers oncogenic characteristics to the cell (Mahanta et al 2008). Antibodies that bind to the PSMGFR peptide or portion of a transmembrane MUC1 cleavage product can be cancer specific but may also bind to stem or progenitor cells. Antibodies that bind to the N−10 peptide are more cancer-specific. In a preferred embodiment an antibody is chosen for the treatment, prevention or diagnosis of cancer based on the ability of the antibody to bind to the N−10 peptide.

[0659] Do not Bind to C−10

[0660] We have demonstrated that the MUC1 extra cellular domain contains an ectopic binding site that is only exposed if the tandem repeat domain is missing, which can occur as a consequence of alternative splice variant or cleavage and release of the extra cellular domain. Cancer-specific antibodies MNC2 and MNE6 will not bind to full-length MUC1, but do bind to the remaining portion when MUC1 is cleaved and the tandem repeat domain is shed. MNC2 and MNE6 will bind to a MUC1*-like protein if it is devoid of tandem repeats, for example if a MUC1 negative cell is transfected or transduced with an engineered MUC1 that is devoid of tandem repeats, especially if extra cellular domain comprises the PSMGFR. Thus, the ectopic site to which MNC2 and MNE6 bind is unmasked when tandem repeat domain is missing or removed. Both MNC2 and MNE6 require the 10 membrane proximal amino acids of a MUC1* extra cellular domain for binding; they do not bind to the C−10 peptide. That means that the ectopic binding site for MNC2 and MNE6 is within or contains all or part of the 10 C-terminal amino acids of the PSMGFR: PFPFSAQSGA. In a preferred embodiment an antibody is chosen for the treatment, prevention or diagnosis of cancer based on the inability of the antibody to bind to the C−10 peptide. In a preferred embodiment an antibody is chosen for the treatment, prevention or diagnosis of cancer based on the ability of the antibody to bind to the N−10 peptide and the inability of the antibody to bind to the C−10 peptide.

[0661] Compete with NME7_{AB} or NME7-X1 for binding to MUC1* positive cell, PSMGFR peptide or N−10 peptide

We have demonstrated that cancer-specific antibodies MNC2 and MNE6 bind to an ectopic epitope that comprises all or part of the 10 C-terminal amino acids of the PSMGFR peptide: PFPFSAQSGA. We have shown that growth factors, dimeric NME1 and NME7_{AB}, also bind to an ectopic epitope that comprises all or part of the 10 C-terminal amino acids of the PSMGFR peptide. MNC2 and MNE6 compete with dimeric NME1 or NME7_{AB} for binding to the PSMGFR peptide and the N−10 peptide. In a preferred embodiment an antibody is chosen for the treatment, prevention or diagnosis of cancer based on the ability of the antibody to disrupt the binding of NME1, NME7_{AB}, or NME7-X1 to the PSMGFR peptide, the N−10 peptide, or to the surface of a MUC1* positive cancer cell.

[0662] Recognize a Conformational Epitope Rather than a Linear Epitope

[0663] Antibodies that are cancer-specific will be chosen based on their ability to bind to a MUC1 that is devoid of tandem repeats and for their inability to bind to full-length MUC1. Most often, MUC1* is generated when MUC1 is cleaved by a cleavage enzyme and the tandem repeat domain is released from the cell surface. Cleavage and release of the tandem repeat domain may also unmask portions of MUC1*-like cleavage products that exist on normal tissues. However, antibodies that recognize a conformation, rather than a linear epitope, are more selective. Antibodies that recognize a conformational epitope rather than a linear epitope can be identified by a variety of means. In particular, antibodies that recognize a conformational epitope will not work in a denaturing Western blot assay. In a preferred embodiment an antibody is chosen for the treatment, prevention or diagnosis of cancer based on the ability of the antibody to recognize a conformational epitope.

[0664] Recognize a MUC1* Generated by Cleavage by MMP9 or Other Tumor-Associated Cleavage Enzyme

[0665] The fold, or conformation, of the MUC1* truncated extra cellular domain differs depending on which enzyme cleaves MUC1. Cleaved MUC1* or MUC1*-like cleavage products can function as growth factor receptors on normal healthy tissues. More than one cleavage enzyme is able to cleave MUC1 to a MUC1*-like form. Cleavage by first enzyme may produce a conformation or a fold that is not the same as that produced by cleavage by a second enzyme. Support for this can be found in this application and is illustrated in FIGS. 39-41. These figures show that although a polyclonal antibody that binds to PSMGFR recognizes a cleaved MUC1 on hematopoietic stem cells, some monoclonal antibodies that bind to the PSMGFR peptide can bind to this MUC1*-like form on hematopoietic stem cells while others cannot. For example, MNC3 readily recognizes this cleaved form of MUC1 on hematopoietic stem cells, but MNC2 and MNE6 do not. We know that MNC2 and MNE6 recognize a MUC1* that is produced by cleavage by MMP9 but not when it is cleaved by MMP2. MNC2 and MNE6 are cancer-specific while MNC3 is not, as it recognizes stem and progenitor cells. We also know that MMP9 is overexpressed in cancers. Bone marrow, where hematopoietic stem cells are made expresses nearly 2,500-times more MMP2 than MMP9 (FIG. 65). MMP14 is another enzyme that cleaves MUC1 to a MUC1* growth factor receptor form (FIG. 38). In one aspect of the invention, an antibody is chosen for the treatment, prevention or diagnosis of cancer based on the ability of the antibody to recognize a MUC1 cleavage product generated when MUC1 is cleaved by MMPP14. In a preferred embodiment an antibody is chosen for the treatment, prevention or diagnosis of cancer based on the ability of the antibody to recognize a MUC1 cleavage product generated when MUC1 is cleaved by MMP9. In a preferred embodiment an antibody is chosen for the treatment, prevention or diagnosis of cancer based on the ability of the antibody to recognize a MUC1 cleavage product generated when MUC1 is cleaved by MMP9 and also recognizes a conformational epitope.

[0666] Binds to Cancer Cells More than Normal Cells

[0667] A traditional approach to identifying antibodies that are cancer-specific involves testing a panel of antibodies against a panel of different cancer cell lines and determining, by FACS, IF, immunoprecipitation or other method, if the antibody binds to cancer cells. Although this approach is traditional, it is sequential and time-consuming, and thus limits the analysis of large numbers of monoclonal antibody clones, which is required to find an ideal antibody suitable for cancer therapeutic or diagnostic. In addition, there are no real normal cell lines and the selection of normal primary cells is limited. The selection criteria presented above provide a rapid, multiplexed method for identifying monoclonal antibody clones that are specific for MUC1* positive cancers. For many of the selection criteria, hybridoma supernatants can be used. This provides a huge advantage over state of the art methods for identifying antibodies that are specific for MUC1* positive cancers. The ability to select antibodies from assay performed using the impure hybridoma supernatants means that much of the selection can be done on hundreds or thousands of clones rapidly and at very little cost. Methods such as FACS analysis ans IHC tissue studies require the use of purified antibodies which limits the number of clones that can be tested to tens, not even hundreds.

[0668] However, selecting an antibody based on its ability to bind to cancer cells, or a cancer cell type or to a cell engineered to express a certain antigen is important for antibody selection. In a preferred embodiment an antibody is chosen for the treatment, prevention or diagnosis of cancer based on the ability of the antibody to bind to MUC1* positive cancer cells.

[0669] Binds to Tumor Tissue More than Normal Tissue

[0670] Immunohistochemistry, IHC, tissue studies of cancerous versus normal tissues is a more stringent test of the cancer specificity of antibodies than FACS analysis. Cancer cell lines are a single cell from a single patient that have been expanded in a lab for decades and are not representative of a cross section of the human population. Further, analysis of cell lines is blind to the heterogeneity of actual tumors. Tissue studies require purified antibody, are very expensive, time-consuming and require a skilled pathologist to analyze each stained tissue specimen. However, antibody staining of tissues from normal tissues versus cancerous tissues can reveal which antibodies cannot be used as therapeutics or diagnostics because of their cross-reactivity with normal tissues. Our systematic studies of numerous antibodies with thousands of human normal tissues or cancerous tissues, across several cancer sub-types showed that antibodies that bind to N−10, not C−10, disrupt the binding of NME1 or NME7_{AB}, or NME7-X1 to the PSMGFR peptide, the N−10 peptide, or to the surface of a MUC1* positive cancer cell, recognize a conformational epitope, and recognize a conformational epitope created by cleavage by MMP9 are the most cancer-specific.

[0671] In a preferred embodiment an antibody is chosen for the treatment, prevention or diagnosis of cancer based on the ability of the antibody to bind to MUC1* positive tumor tissue at least 2-times more than it binds to normal tissues. In a preferred embodiment an antibody is chosen for the treatment, prevention or diagnosis of cancer based on the ability of the antibody to bind to MUC1* positive tumor tissue at least 5-times more than it binds to normal tissues. In a preferred embodiment an antibody is chosen for the treatment, prevention or diagnosis of cancer based on the ability of the antibody to bind to MUC1* positive tumor tissue at least 10-times more than it binds to normal tissues.

[0672] Antibodies that Bind to Refined Epitopes

[0673] In a preferred embodiment, an antibody, or fragments thereof, that binds to a peptide comprising the sequence QFNQYKTEAASRYNLTISDVSVSDVPFPFSAQSGA are incorporated into anti-cancer therapeutics or diagnostics.

[0674] In a more preferred embodiment, an antibody, or fragments thereof, that binds to a peptide comprising the sequence ASRYNLTISDVSVSDVPFPFSAQSGA are incorporated into anti-cancer therapeutics or diagnostics.

[0675] In a yet more preferred embodiment, an antibody, or fragments thereof, that binds to a peptide comprising the sequence SDVSVSDVPFPFSAQSGA are incorporated into anti-cancer therapeutics or diagnostics.

[0676] In a still more preferred embodiment, an antibody, or fragments thereof, that binds to a peptide comprising the sequence SVSDV are incorporated into anti-cancer therapeutics or diagnostics.

[0677] In a yet still more preferred embodiment, an antibody, or fragments thereof, that binds to a peptide comprising some or all of the sequence PFPFSAQSGA are incorporated into anti-cancer therapeutics or diagnostics.

[0678] Consensus Sequences

[0679] Antibodies of the invention were categorized according to cognate epitope. Sequences of their respective heavy chain CDRs are shown in Table 5. Sequences of their respective light chain CDRs are shown in Table 6. Consensus sequences for CDR1, CDR2 and CDR3 for each Substitute Specification -Clean Atty. Docket No. 56699-741.301 epitope-specific set of antibodies were computer generated. FIG. 215 and FIG. 216 show how the CDR consensus sequences change as the position of the antibodies' cognate epitope moves from the membrane-proximal portion of PSMGFR toward the more distal portions.

[0680] As can be seen in Table 5 and Table 6, the sequences for CDR1 and CDR2 for antibodies that bind to epitopes within the 10 membrane-proximal (C-terminal) portion of PSMGFR peptide closely adhere to the consensus sequence.

[0681] Whereas Heavy Chain CDR1 for MNC2 is FTFSGYAMS, with the amino acids numbered from left to right 1 through 9, the consensus of other antibodies that bind to that portion of PSMGFR is: F or I at position 1, T at position 2, F at position 3, S at position 4, T, G, or R at position 5, Y at position 6, A, G or T at position 7, M at position 8 and S at position 9.

[0682] In a preferred embodiment an antibody is chosen for the treatment, prevention or diagnosis of cancer based on having a heavy chain CDR1 that is at least 90% identical to a CDR1 comprising the following amino acids at the specified positions: F or I at position 1, T at position 2, F at position 3, S at position 4, T, G, or R at position 5, Y at position 6, A, G or T at position 7, M at position 8 and S at position 9.

[0683] Whereas Heavy Chain CDR2 for MNC2 is TISSGGTYIYYPDSVKG, with the amino acids numbered from left to right 1 through 17, the consensus of other antibodies that bind to that portion of PSMGFR is: T at position 1, I or S at position 2, I or S at position 3, G or R at position 5, G or A at position 6, T or I at position 9, Y at position 10, Y at position 11, P or S at position 12 and DSVKG for positions 13-17.

[0684] In a preferred embodiment an antibody is chosen for the treatment, prevention or diagnosis of cancer based on having a heavy chain CDR2 that is at least 90% identical to a CDR2 comprising the following amino acids at the specified positions: T at position 1, I or S at position 2, I or S at position 3, G or R at position 5, G or A at position 6, T or I at position 9, Y at position 10, Y at position 11, P or S at position 12 and DSVKG for positions 13-17.

[0685] Whereas Heavy Chain CDR3 for MNC2 is -LGGDNYYEYFDV--, with the amino acids numbered from left to right 1 through 15, the consensus of other antibodies that bind to that portion of PSMGFR is: G, L, or N at position 2, G or T at position 4, Y at position 7, D or E at position 12, A at position 14, and Y at position 15.

[0686] In a preferred embodiment an antibody is chosen for the treatment, prevention or diagnosis of cancer based on having a heavy chain CDR3 that is at least 90% identical to a CDR3 comprising the following amino acids at the specified positions: G, L, or N at position 2, G or T at position 4, Y at position 7, D or E at position 12, A at position 14, and Y at position 15.

[0687] Whereas Light Chain CDR1 for MNC2 is RASKS--VSTSGYSYMH, with the amino acids numbered from left to right 1 through 17, the consensus of other antibodies that bind to that portion of PSMGFR is: K or R at position 1, A or S at position 2, S at position 3, K or Q at position 4, S at position 5, V at position 6, L at position 7, T or S at position 10, Y at position 15, and I, L or M at position 16.

[0688] In a preferred embodiment an antibody is chosen for the treatment, prevention or diagnosis of cancer based on having a light chain CDR1 that is at least 90% identical to a CDR1 comprising the following amino acids at the specified positions: K or R at position 1, A or S at position 2, S at position 3, K or Q at position 4, S at position 5, L or V at position 6, L at position 7, T or S at position 10, Y at position 15, and I, L or M at position 16.

[0689] Whereas Light Chain CDR2 for MNC2 is LASNLES, with the amino acids numbered from left to right 1 through 7, the consensus of other antibodies that bind to that portion of PSMGFR is: L or W, or S at position 1, A or T at position 2, S at position 3, N or T at position 4, L or R at position 5, E or A at position 6, and S at position 7.

[0690] In a preferred embodiment an antibody is chosen for the treatment, prevention or diagnosis of cancer based on having a light chain CDR2 that is at least 90% identical to a CDR2 comprising the following amino acids at the specified positions: L or W, or S at position 1, A or T at position 2, S at position 3, N or T at position 4, L or R at position 5, E or A at position 6, and S at position 7.

[0691] Whereas Light Chain CDR3 for MNC2 is QHSRELPFT, with the amino acids numbered from left to right 1 through 9, the consensus of other antibodies that bind to that portion of PSMGFR is: Q at position 1, H or Q at position 2, S, Q or R at position 3, R, S or Y at position 4, E, L, or S at position 5, L or S at position 6, P or S at position 7, F or L at position 8 and T at position 9.

[0692] In a preferred embodiment an antibody is chosen for the treatment, prevention or diagnosis of cancer based on having a light chain CDR3 that is at least 90% identical to a CDR3 comprising the following amino acids at the specified positions: Q at position 1, H or Q at position 2, S, Q or R at position 3, R, S or Y at position 4, E, L, or S at position 5, L or S at position 6, P or S at position 7, F or L at position 8 and T at position 9.

[0693] Another set of antibodies was generated and resultant clones were tested for their ability to bind to PSMGFR, N−10 and C−10 peptides. Antibody clones that bound to PSMGFR and N−10 peptides, but not to the C−10 peptide were selected. These antibodies were sequenced. Table 7 shows the sequences of the heavy chain CDRs for cancer-specific antibodies MNC2, MNE6, 20A10, 3C2B1, plus new antibodies B2, B7, 8C7F3, H11 and B9. Table 8 shows the sequences of the light chain CDRs for cancer-specific antibodies MNC2, MNE6, 20A10, 3C2B1, plus new antibodies B2, B7, 8C7F3, H11 and B9. Consensus sequences for the heavy and light chain CRDs were generated and are shown in Table 7 and Table 8. Although antibodies 5C6F3 and 25E6 showed great cancer specificity in IHC tissue studies and they both bound to the PSMGFR and N−10 peptides, but not to the C−10 peptide, epitope mapping showed that they bound to epitopes that were a bit N-terminal to the epitopes to which MNC2, MNE6, 20A10 and 3C2B1 bound. For this reason, consensus sequences were generated for MNC2, MNE6, 20A10, 3C2B1 and the new antibodies plus consensus sequences were generated for all the antibodies that bound to N−10 but not to C−10.

[0694] As can be seen in Table 7 and Table 8, the sequences for CDR1, CDR2 and CDR3 for antibodies that require for binding the 10 membrane-proximal (C-terminal) amino acids of PSMGFR peptide closely adhere to a common consensus sequence.

[0695] Whereas Heavy Chain CDR1 for MNC2 is FTFSGYAMS, with the amino acids numbered from left to right 1 through 9, the consensus sequence of MNC2, MNE6, 20A10, 3C2B1 and new antibodies B2, B7, 8C7F3, H11 and B9 is: F or I at position 1, T or A at position 2, F at position 3, S at position 4, T, G, or R at position 5, Y or F at position 6, A, G or T at position 7, M at position 8 and S at position 9. The underlined amino acids at positions 2 and 6 are the only additional variants to the consensus sequence generated for cancer-specific antibodies MNC2, MNE6, 20A10, 3C2B1 alone.

[0696] As can be seen in Table 7, the inclusion of antibodies 5C6F3 and 25E6 into the generation of consensus sequence did not change in any way the consensus sequence for heavy chain CDR1 that describes a cancer-specific anti-MUC1* antibody.

[0697] In a preferred embodiment an antibody is chosen for the treatment, prevention or diagnosis of cancer based on having a heavy chain CDR1 that is at least 9000 identical to a CDR1 comprising the following amino acids at the specified positions: F or I at position 1, T or A at position 2, F at position 3, S at position 4, T, G, or R at position 5, Y or F at position 6, A, G or T at position 7, M at position 8 and S at position 9.

[0698] Whereas Heavy Chain CDR2 for MNC2 is TISSGGTYIYYPDSVKG, with the amino acids numbered from left to right 1 through 17, the consensus sequence of MNC2, MNE6, 20A10, 3C2B1 and new antibodies B2, B7, 8C7F3, H11 and B9 is:

[0699] T or A at position 1, I or S at position 2, I or S at position 3, N, S, T or G at position 4, G or R at position 5, G or A at position 6, G, T, or D at position 7, Y, K or S at position 8, T or I at position 9, Y at position 10, Y at position 11, P or S at position 12 and D at position 13, S or T at position 14, V or L at position 15 and KG for positions 16-17. The underlined amino acids indicate how this more inclusive consensus sequence differs from the consensus sequence generated for MNC2, MNE6, 20A10 and 3C2B1 alone. Of the 17 amino acids in heavy chain CDR2, the consensus sequence for all nine antibodies differs from the consensus sequence for the original cancer-specific four by only 4 amino acids. Note that 2 of the 4 variants are homologous changes, T for S and L for V, which generally do not significantly impact the structure or specificity of a protein.

[0700] As can be seen in Table 7, the inclusion of antibodies 5C6F3 and 25E6 into the generation of consensus sequence for heavy chain CDR2 only changed the consensus sequence by the addition of two other possible amino acids: a possible H at position 8, and a possible F at position 10, for a heavy chain CDR2 that describes a cancer-specific anti-MUC1* antibody. We note that the change of Y to F at position 10 is a homologous change, which generally does not significantly impact the structure or specificity of a protein.

[0701] In a preferred embodiment an antibody is chosen for the treatment, prevention or diagnosis of cancer based on having a heavy chain CDR2 that is at least 90% identical to a CDR2 comprising the following amino acids at the specified positions: T or A at position 1, I or S at position 2, I or S at position 3, N, S, T or G at position 4, G or R at position 5, G or A at position 6, G, T, or D at position 7, Y, K, H or S at position 8, T or I at position 9, Y or F at position 10, Y at position 11, P or S at position 12 and D at position 13, S or T at position 14, V or L at position 15 and KG for positions 16-17.

[0702] Whereas Heavy Chain CDR3 for MNC2 is LGGDNYYEYFDV, with the amino acids numbered from left to right 2 through 13, the consensus sequence of MNC2, MNE6, 20A10, 3C2B1 and new antibodies B2, B7, 8C7F3, H11 and B9 is:

[0703] G, L, or N at position 2, G, T, or Y at position 3, G or T at position 4, A, D, P, R, or S at position 5, Y, M, I or S at position 6, Y at position 7, D, Y, or N at position 8, E, D, Y, L or H at position 9, Y, A, or G at position 10, M, D or F at position 11, D or E at position 12, V, F, Y or L at position 13, and AY at position 14-15. The underlined amino acids indicate how this more inclusive consensus sequence differs from the consensus sequence generated for MNC2, MNE6, 20A10 and 3C2B1 alone. Of the 15 amino acids in heavy chain CDR3, the consensus sequence for all nine antibodies differs from the consensus sequence for the original cancer-specific four by 7 amino acids, with 3 of the 7 substitutions at position 6. For this reason, we conclude that the amino acid at position 6 can be varied without altering the specificity of the antibody.

[0704] Analysis of the consensus sequence generated with the inclusion of antibodies 5C6F3 and 25E6 highlighted which amino acids were conserved among all eleven antibodies. For this reason, our preferred consensus sequence for heavy chain CDR3 defines amino acids at positions 2, 3, 4, 7, 10, 11, 12, 14 and 15, where for 11 antibodies, there were 3 or less variants at these positions.

[0705] In a preferred embodiment an antibody is chosen for the treatment, prevention or diagnosis of cancer based on having a heavy chain CDR3 that is at least 90% identical to a CDR3 comprising the following amino acids at the specified positions: G, L, or N at position 2, G, T, or Y at position 3, G or T at position 4, Y at position 7, Y, A, or G at position 10, M, D or F at position 11, D or E at position 12 and AY at position 14-15.

[0706] Whereas Light Chain CDR1 for MNC2 is RASKS--VSTSGYSYMH, with the amino acids numbered from left to right 1 through 17, the consensus sequence of MNC2, MNE6, 20A10, 3C2B1 and new antibodies B2, B7, 8C7F3, H11 and B9 is:

[0707] K or R at position 1, A or S at position 2, S or R at position 3, K, Q or A at position 4, S, N or T at position 5, V, I, E, or K at position 6, L, V or S at position 7, S, Y, I or V at position 8, A, S, or H at position 9, T or S at position 10, N, S, or Y at position 11, G, S, D, or Q at position 12, V, Y, K or N at position 13, N, S, or T at position 14, Y or F at position 15, and I, L or M at position 16, and H, A, E or Q at position 17. The underlined amino acids indicate how this more inclusive consensus sequence differs from the consensus sequence generated for MNC2, MNE6, 20A10 and 3C2B1 alone. Of the 17 amino acids in light chain CDR1, the consensus sequence for all nine antibodies differs from the consensus sequence for the original cancer-specific four by 13 amino acids. 4 of the 13 are homologous substitutions, which in general do not significantly alter the structure or specificity of the protein. Of the remaining 9 substitutions, 1 is at position 4, 1 is at position 5, 3 are at position 6, 1 is at position 7, 1 is at position 11, and 2 are at is at position 17. The inclusion of the 5 new antibodies did not alter the amino acids, excluding homologous substitutions, at positions 1, 2, 3, 8, 9, 10, 12, 13, 14, 15 or 16. For this reason, we conclude that the conserved consensus sequence for light chain CDR1 that defines a MUC1* cancer-specific antibody comprises the amino acids given above for positions 1, 2, 3, 8, 10, 12, 13, 14, 15 and 16.

[0708] Analysis of the consensus sequence generated with all the antibodies, including 5C6F3 and 25E6 further altered the consensus sequence for light chain CDR1 with amino acid substitutions as follows: L at position 6; D at position 9; D at position 11 and N at position 17. We note that none of these substitutions were at positions that were invariant for the original four cancer-specific antibodies plus the five new antibodies. Thus, we conclude that a conserved consensus sequence for light chain CDR1 that defines at least 90% identity of a cancer-specific antibody comprises amino acids defined above at positions 1, 2, 3, 8, 10, 12, 13, 14, 15 and 16.

[0709] In a preferred embodiment an antibody is chosen for the treatment, prevention or diagnosis of cancer based on having a light chain CDR1 that is at least 90% identical to a CDR1 comprising K or R at position 1, A or S at position 2, S or R at position 3, S, Y, I or V at position 8, T or S at position 10, G, S, D, or Q at position 12, V, Y, K or N at position 13, N, S, or T at position 14, Y or F at position 15, and I, L or M at position 16.

[0710] Whereas Light Chain CDR2 for MNC2 is LASNLES, with the amino acids numbered from left to right 1 through 7, the consensus sequence of MNC2, MNE6, 20A10, 3C2B1 and new antibodies B2, B7, 8C7F3, H11 and B9 is: L, W, S, T or K at position 1, A, T or V at position 2, S at position 3, N or T at position 4, L or R at position 5, E, A, F or D at position 6, and S at position 7. The underlined amino acids indicate how this more inclusive consensus sequence differs from the consensus sequence generated for MNC2, MNE6, 20A10 and 3C2B1 alone.

[0711] In a preferred embodiment an antibody is chosen for the treatment, prevention or diagnosis of cancer based on having a light chain CDR2 that is at least 90% identical to a CDR2 comprising the following amino acids at the specified positions: L, W, S, T or K at position 1, A, T or V at position 2, S at position 3, N or T at position 4, L or R at position 5, E, A, F or D at position 6, and S at position 7. Of the 7 positions, the inclusion of the five new antibodies introduced 5 substitutions of which only 2 were not homologous substitutions.

[0712] Analysis of the consensus sequence generated with all the antibodies, including 5C6F3 and 25E6 further altered the consensus sequence for light chain CDR2 with amino acid substitutions as follows: K at position 4, which is a substitution that is homologous to N.

[0713] In a preferred embodiment an antibody is chosen for the treatment, prevention or diagnosis of cancer based on having a light chain CDR2 that is at least 90% identical to a CDR2 comprising: A, T or V at position 2, S at position 3, N, T, or K at position 4, L or R at position 5, E, A, F or D at position 6, and S at position 7.

[0714] Whereas Light Chain CDR3 for MNC2 is QHSRELPFT, with the amino acids numbered from left to right 1 through 9, t the consensus sequence of MNC2, MNE6, 20A10, 3C2B1 and new antibodies B2, B7, 8C7F3, H11 and B9 is: Q or F at position 1, H or Q at position 2, S, Q, R, D or N at position 3, R, S, Y or N at position 4, E, L, S or H at position 5, L, S, V, D or Y at position 6, P or S at position 7, F, L or P at position 8 and T at position 9. The underlined amino acids indicate how this more inclusive consensus sequence differs from the consensus sequence generated for MNC2, MNE6, 20A10 and 3C2B1 alone.

[0715] Analysis of the consensus sequence generated with all the antibodies, including 5C6F3 and 25E6 further altered the consensus sequence for light chain CDR2 with amino acid substitutions as follows: W at position 1; G at position 3; T at position 4; F at position 5; Q at position 8.

[0716] In a preferred embodiment an antibody is chosen for the treatment, prevention or diagnosis of cancer based on having a light chain CDR3 that is at least 90% identical to a CDR2 comprising: Q, F or W at position 1, H or Q at position 2, R, S, T, Y or N at position 4, E, L, S or H at position 5, L, S, V, D or Y at position 6, P or S at position 7, and T at position 9.

[0717] Other General Strategy for Using Antibodies, Antibody Fragments and CARs that Target the Extracellular Domain of MUC1*

[0718] In another aspect, the invention is directed to a composition that includes at least two different plasmids transfected into the same immune cell, wherein the first encodes a CAR comprising an antibody fragment, scFv, or peptide that binds to a tumor antigen and the other encodes a gene that is not a CAR, wherein the gene that is not a CAR is expressed from an inducible promoter that is activated by elements of an activated immune cell. In one aspect, the immune cell is a T cell or an NK cell. In one aspect the CAR comprises an antibody fragment, scFv or peptide that binds to the extra cellular domain of MUC1*. In one aspect the CAR comprises an scFv derived from MNC2, MNE6, 20A10, 3C2B1, 5C6F3, 25E6, 18G12, 28F9, 1E4, B12, B2, B7, B9, 8C7F3, or H11. In one aspect the non-CAR species is a cleavage enzyme. In one aspect the cleavage enzyme is MMP2, MMP3, MMP9, MMP13, MMP14, MMP16, ADAM10, ADAM17, ADAM28 or catalytically active fragments thereof. In another aspect the non-CAR species is a cytokine. In one aspect, the Cytokine is IL-7. In one aspect the cytokine is IL-15. In one aspect the cytokine is IL-12. In one aspect the cytokine is IL-18. The sequence of an activated IL-18 is given (SEQ ID NOS:1637-1638). Two examples of NFAT-inducible IL-18 embedded in the Foxp3 enhancer region are given (SEQ ID NOS:1639-1640). Two examples of NFAT-inducible IL-18 embedded in the IL-2 enhancer region are given (SEQ ID NOS:1641-1642). In one case, there are three (3) NFAT response elements and in the other case there are six (6) NFAT response elements. The number of NFAT response elements can be varied in order to get the desired amount of IL-18 expressed upon CAR T cell recognition of the target. Examples of antibodies of the invention incorporated into CARS with inducible IL-18 are shown as: murine or human MNC2 in a CAR with a 4-1BB or CD28 co-stimulatory domain plus inducible IL-18 (SEQ ID NOS:1643-1646), or also with a 1XX mutated CD3-zeta (SEQ ID NOS:1647-1650); murine or human MNE6 in a CAR with a 4-1BB or CD28 co-stimulatory domain plus inducible IL-18 (SEQ ID NOS:1651-1654), or also with a 1XX mutated CD3-zeta (SEQ ID NOS:1655-1658); murine or human 20A10 in a CAR with a 4-1BB or CD28 co-stimulatory domain plus inducible IL-18 (SEQ ID NOS:1659-1662), or also with a 1XX mutated CD3-zeta (SEQ ID NOS:1663-1666); murine or human 25E6 in a CAR with a 4-1BB or CD28 co-stimulatory domain plus inducible IL-18 (SEQ ID NOS:1667-1670), or also with a 1XX mutated CD3-zeta (SEQ ID NOS:1671-1674). In another aspect the cytokine is IL-7 and IL-15. In one case expression of the non-CAR species is induced by elements of an activated immune cell. In one aspect the element of an activated immune cell is an NFAT. In one aspect the NFAT is NFATc1, NFATc3 or NFATc2. Cytokines IL-7, IL-15, IL-12 and IL-18 are known to promote T cell persistence. In one aspect of the invention an immune cell described above is administered to a patient for the treatment or prevention of cancer. In one aspect of the invention, the cancer is a MUC1 positive cancer or a MUC1* positive cancer.

[0719] In addition to making CAR T cells that also induce expression of a cleavage enzyme, we made CAR T cells that also induce local and transient expression of IL-18. Many of the T cell based inducible systems reported insert the gene to be inducibly expressed into an IL-2 promoter or enhancer. We compared inducible expression off an IL-2 promoter/enhancer to inducible expression off of a portion of the Foxp3 enhancer. In this particular example, human T cells were transduced with both huMNC2-CAR44 and an NFAT inducible IL-18, wherein the 11-18 gene was either inserted into an IL-2 promoter or the Foxp3 enhancer region. It is known in the field that a major problem with CAR Ts with inducible second factors is that the second factor is leaky, meaning that significant expression of the second factor occurs without activation of the CAR T cell. The other problem with existing inducible systems is the length of time that goes by between when the CAR T cell is activated and the second factor is induced is typically very long so that the cell secreting the second factor may be far away from the tumor by the time the second factor is expressed.

[0720] FIG. 211A-211C show graphs of an ELISA experiment measuring the amount of IL-18 secreted into the condition media of huMNC2-CAR44 T cells, which also bear an NFAT inducible IL-18, co-cultured with MUC1* positive cancer cells. As a method of inducing varying levels of IL-18 expression, we co-cultured the CAR T cells with cancer cells doped with increasing amounts of cells that were engineered to express even more MUC1*. In these figures we show T47D cancer cells that are either wild-type, or doped with 5%, 10% or 30% of the T47D cells expressing more MUC1*. FIG. 211A shows the graph of IL-18 secreted into the supernatant of T47D breast cancer cells co-cultured with untransduced human T cells. FIG. 211B shows the graph of IL-18 secreted into the supernatant of T47D breast cancer cells co-cultured with huMNC2-CAR44 T cells that also bore an NFAT inducible IL-18 gene inserted into a portion of the Foxp3 enhancer. FIG. 211C shows the graph of IL-18 secreted into the supernatant of T47D breast cancer cells co-cultured with huMNC2-CAR44 T cells that also bore an NFAT inducible IL-18 gene inserted into a portion of the IL-2 enhancer. As can be seen in the figure, the Foxp3 system induces rapid and robust expression of IL-18, which is significantly faster and higher than that of the same construct in an IL-2 promoter. In this example, the IL-18 gene is inserted downstream of six (6) NFAT response elements, however one can attenuate the amount of the second factor by using a lesser number of response elements or enhance the amount by increasing the number of NFAT response elements.

[0721] It has been reported that IL-18 increases persistence of CAR T cells in vivo. However, we observed an unexpected result. In a dose-dependent manner, secretion of IL-18 increased the killing of low antigen density cells by the CAR T cells. We differentially labeled the T47D-wt cells (red: mCherry) and those T47Ds that were transduced to express more MUC1* (green: GFP). FIG. 212A-212X shows photographs of T47D breast cancer cells (red) doped with varying percentages of T47D cells engineered to express more MUC1* (green). The target cancer cells have been co-cultured with huMNC2-CAR44 T cells with NFAT inducible IL-18 wherein the IL-18 gene has been inserted into either the Foxp3 enhancer/promoter or the IL-2 enhancer/promoter. FIGS. 212A-212C, 212I-212K, and 212Q-212S show the cancer cells co-cultured with untransduced T cells. FIGS. 212D-212F, 212L-212N, and 212T-212V show the cancer cells co-cultured with hiMNC2-CAR44 T cells with the NFAT inducible IL-18 gene inserted into the Foxp3 enhancer/promoter. FIGS. 212G-212H, 212O-212P, and 212W-212X show the cancer cells co-cultured with hiMNC2-CAR44 T cells with the NFAT inducible IL-18 gene inserted into the IL-2 enhancer/promoter. As can be seen in the figure, the low antigen density T47D-wt type cells (red) are being killed when doped with higher percentages of cells that express more MUC1* and thus secrete more IL-18. The experiment shows that this is not just a bystander effect, because the cells expressing IL-18 off of the IL-2 promoter, which expresses much lower levels of IL-18, do not kill the low antigen density cells even when they are doped with 30% cells expressing more MUC1*.

[0722] We then showed that the CAR T mediated killing is specific for the CAR T specific antigen. We performed a similar experiment, wherein control, MUC1/MUC1* negative cells were doped with 5%, 10% or 30% of the T47D cells expressing more MUC1*, and co-cultured with MUC1* specific CAR T cells. FIG. 213A-213B shows graphs of ELISA experiments in which levels of IL-18 secreted into the conditioned media are measured for huMNC1-CAR44 T cells with NFAT inducible IL-18 gene, inserted into the Foxp3 enhancer or promoter, co-cultured with either MUC1* positive cancer cells or MUC1 negative non-cancerous cells. FIG. 213A shows IL-18 secretion from huMNC2-CAR44 T cells with NFAT inducible IL-18 in co-culture with T47D breast cancer cells where the population has been doped with 5%, 10% or 30% T47D cells that had been transfected with even more MUC1*. FIG. 213B shows IL-18 secretion from huMNC2-CAR44 T cells with NFAT inducible IL-18 in co-culture with non-cancerous, MUC1 negative HEK293 cells where the cell population has been doped with 5%, 10% or 30% T47D cells that had been transfected with more MUC1*. As can be seen in the figure, the amount of IL-18 secreted into the media can be attributed to the MUC1* positive cells that the population was doped with. Time course fluorescent photographs of the experiment show that even when doped with significant percentages of high antigen density MUC1* positive cells, the MUC1 negative cells are not killed by the MUC1* targeting CAR T cells. FIG. 214A-214X shows photographs of T47D breast cancer cells (red) or non-cancerous HEK293 cells (also red), where both cell types have been doped with varying percentages of T47D cells engineered to express more MUC1* (green). These target cancer cells have been co-cultured with huMNC2-CAR44 T cells with NFAT inducible IL-18 wherein the IL-18 gene has been inserted into the Foxp3 enhancer/promoter. FIG. 214A-214F shows either T47D cells or HEK293 cells that have not been doped with T47D cells engineered to express high MUC1* density. FIG. 214G-214L shows either T47D cells or HEK293 cells that have been doped with 5% T47D cells engineered to express high MUC1* density. FIG. 214M-214R shows either T47D cells or HEK293 cells that have been doped with 10% T47D cells engineered to express high MUC1* density. FIG. 214S-214X shows either T47D cells or HEK293 cells that have been doped with 30% T47D cells engineered to express high MUC1* density. FIGS. 214A-B, G-H, M-N, and S-T show T47D breast cancer cells. FIGS. 214C-F, I-L, O-R, and U-X show HEK293 cells. As can be seen in the figures, the induced secretion of IL-18 resulted in low MUC1* density T47D cells being killed but did not induce non-specific killing of the MUC1* negative HEK293 cells. Taken together these results show that the Foxp3 system is a superior system for the inducible expression of a second factor and especially useful in CAR T systems. Further we have demonstrated the unexpected result that IL-18 increases the killing of low antigen density cells without the unwanted effect of killing nearby MUC1/MUC1* negative cells.

[0723] In another aspect, the invention is directed to a composition that includes at least two different plasmids transfected into the same immune cell, wherein the first encodes a CAR comprising an antibody fragment, scFv or peptide that binds to the extra cellular domain of an antigen on the surface of a B cell and the other encodes a gene that is not a CAR, wherein the gene that is not a CAR is expressed from an inducible promoter that is activated by elements of an activated immune cell. In one aspect, the immune cell is a T cell or an NK cell. In one aspect the CAR comprises an antibody fragment, scFv or peptide that binds to CD19. In another aspect the antibody fragment, scFv or peptide binds to a surface antigen of a B cell or a B cell precursor, or binds to CD19, CD20, CD22, BCMA, CD30, CD138, CD123, CD33 or LeY antigen. In one aspect the non-CAR species is a cleavage enzyme. In another aspect the non-CAR species is a cytokine. In one aspect, the Cytokine is IL-7. In one aspect the cytokine is IL-15. In another aspect the cytokine is IL-7 and IL-15. In one case expression of the non-CAR species is induced by elements of an activated immune cell. In one aspect the element of an activated immune cell is an NFAT. In one aspect the NFAT is NFATc1, NFATc3 or NFATc2. that is not a CAR, wherein the gene that is not a CAR is expressed from an inducible promoter wherein expression is induced by elements of an activated immune cell. In one aspect the immune cell transfected or transduced with the composition is administered to a patient for the treatment or prevention of cancer. In one case the cancer is a leukemia, lymphoma or blood cancer.

[0724] It is not intended for the invention to be limited by a specific method or technology for inserting the gene or plasmid comprising a sequence encoding a CAR or activated T cell inducible protein or peptide there encoded. For example, the gene encoding the CARs and activated T cell induced genes described herein can be virally transduced into an immune cell using viruses, which may or may not result in the CAR gene being integrated into the genome of the recipient cell. Virus delivery systems and viral vectors include but are not limited to retroviruses, including gamma-retroviruses, lentivirus, adenoviruses, adeno-associated viruses, baculoviruses, poxvirus, herpes simplex viruses, oncolytic viruses, HIF10, T-Vec and the like. In addition to viral transduction, CARs and activated T cell induced genes described herein can be directly spliced into the genome of the recipient cell using methods such as CRISPR technology, CRISPR-Cas9 and -CPF1, TALEN, Sleeping Beauty transposon system, and SB 100×.

[0725] Bulky cell surface proteins such as MUC1-FL can also cause a steric hindrance problem for BiTEs. A BiTE is a two-headed bi-specific antibody wherein one head binds to a T cell and the other head binds to a tumor-associated antigen. In this way, the BiTE links together the T cell and the tumor cells. The antibody that binds to the T cell should be an antibody that activates the T cell, such as an antibody against CD3 or CD28. To solve the steric hindrance problem, the linker between the T cell specific antibody and the tumor specific antibody is lengthened.

[0726] In another aspect of the invention, an anti-MUC1* single chain molecule is fused to a cleavage enzyme or a catalytically active fragment of a cleavage enzyme. In one aspect of the invention, the cleavage enzyme is MMP9 (SEQ ID NO:643). In another aspect of the invention, the enzyme is a catalytically active fragment of MMP9 (SEQ ID NO:645). In some cases, the antibody fragment of the CAR is chosen for its ability to recognize MUC1* when cleaved by that specific cleavage enzyme. In one embodiment, the cleavage enzyme is MMP9, MMP3, MMP14, MMP2, ADAM17, ADAM TS16, and/or ADAM28. In one embodiment, the antibody or antibody fragment binds to a peptide having the sequence of (PSMGFR) GTINVHDVETQFNQYKTEAASRYNLTISDVSVSDVPFPFSAQSGA, PSMGFR N−10, QFNQYKTEAASRYNLTISDVSVSDVPFPFSAQSGA, or PSMGFR N+20 SNIKFRPGSVVVQLTLAFREGTINVHDVETQFNQYKTEAASRYNLTISDVSVSDVPFPFS AQSGA. In another embodiment, cleavage enzymes MMP9 and MMP3 are transduced into a T cell that is also transduced with a CAR with an antibody fragment that is a fragment of MNC2.

[0727] In many cases it is desirable to have the cleavage enzyme expressed only after an immune cell recognizes the tumor-associated target on a solid tumor. In this way, the cleavage enzyme will not freely move throughout the body, cleaving MUC1, MUC16 or other proteins, wherein their cleavage could actually promote cancer. However, there are cancers that are physically accessible to direct application of chemotherapy agents, CAR T cells and other anti-cancer agents. For example, types of brain cancers, prostate cancer and ovarian cancers have all shown the benefit of direct application of anti-cancer agents into the local vicinity of the cancer. CAR T cells have been injected directly into the brain and/or cerebral spinal fluid of glioblastoma patients. Radiation has been directed to the prostate area for the treatment of prostate cancers, including those that have metastasized. Hot chemo therapy agents have been directly injected into the intraperitoneal cavity for the treatment of ovarian cancers. In these and other cases, where the cancers that are physically accessible to direct application of chemotherapy agents, a cleavage enzyme is administered in the presence or absence of another anti-cancer agent, which could be a CAR T cell, an immune cell engineered to recognize a tumor-associated antigen, a BiTE, an ADC, a biological or a standard chemotherapy agent. Although ovarian cancer can metastasize to anywhere in the body, it usually stays in the abdomen as it spreads to adjacent organs, such as the intestines, liver and stomach. This makes ovarian cancer an ideal test case for improving the effect of anti-cancer agents by administering a cleavage enzyme in combination with other anti-cancer agents, including a platinum-based drug such as carboplatin (Paraplatin) or cisplatin, and/or a taxane such as paclitaxel (Taxol) or docetaxel (Taxotere). Alkeran (Melphalan), Avastin (Bevacizumab), Carboplatin, Clafen (Cyclophosphamide), and Cytoxan have all been approved for the treatment of ovarian cancer. Other treatments that are being tested for the treatment of ovarian cancers include agents that target MUC1, MUC16 and as described herein, MUC1*.

[0728] Other cleavage enzymes can be used in addition to or in place of MMP9. MMP14 for example, has been shown to efficiently cleave MUC1 to MUC1* (FIG. 38). In one aspect of the invention, MMP14 is expressed in an immune cell that is also engineered to express a CAR. In one case the CAR is an anti-MUC1* CAR. For example, it can be an MNC2-CAR44 transduced T cell. In another aspect of the invention, the MMP14 is directly administered to the patient either in the location of the tumor or by i.v.

[0729] In yet another aspect of the invention, the cancer is an ovarian cancer and either MMP9 or MMP14 is directly injected into the abdominal area along with an anti-cancer agent, which can be a chemotherapy agent, a biological, an anti-MUC1* CAR T or an anti-MUC16 CAR T.

[0730] In addition to local administration of the cleavage enzyme, +iv administration alone or secreted from an immune cell, which may be a CAR T cell, which further may be expressed off of an inducible promoter is contemplated.

[0731] Methods Used in Carrying Out Experimentation in Relation to the Present Invention

[0732] 1. Lentivirus Production and Viral Transduction of Immune Cells

[0733] HEK293 or HEK293T cells (ATCC) were used to produce lentivirus. The day prior transfection plates (6well plate) were coated with poly-D-lysine and cells seeded so that cell density reaches 90-95% at the time of transfection and cultures in a 5% CO₂ atmosphere. The next day cells were transfected with Lipofectamine 3000 (life technologies) and Opti-MEM® I Reduced Serum Medium according to the manufacturer instructions (0.75 ug of lentiviral expression vector and 2.25 ug of pPACKH1 packaging mix was used). After 6h incubation, the media was changed and media containing lentivirus was harvested after 24 and 48 hours. Lentivirus was concentrated with Lenti-X concentrator (Clontech) and titer was calculated using the Lenti-X p@4 Rapid Titer Kit (Clontech). Lentivirus was store at -80C in single-use aliquots.

[0734] Transduction of Immune Cells with Constructs Including CARs

[0735] Human T cells, if frozen, were thawed and pre-warmed in 100-200 units IL-2 and TexMACS medium, 20 ml, and pelleted by centrifugation. Cells were resuspended in 10 ml of medium and cultured at 37° C., 5% CO₂ at 1×10⁶ cells/ml in complete medium with anti-CD3/anti-CD28 beads (TransAct kit).

[0736] After 4 days in culture, cells were counted and 450 ul of cell suspension was placed in single well of a 24-well plate at a density of approximately 1×10⁶ cells/ml. Cells were allowed to settle. 150 ul was carefully removed from the top of each well. To each well was added an appropriate dilution of lentiviral vector, diluted in plain TexMACS medium, along with protamine sulfate to a final concentration of 10 ug/ml, in a 150 ul volume, for a final total volume of 450 ul per well and incubated for 24 hrs. Transduced cells were removed, pelleted by centrifugation, and resuspended in fresh medium, adjusting cell density, not to exceed 1.0×10⁶ cells/ml. Transduced T cells can be expanded and frozen or used directly. Typically transduced T cells are used or frozen between Day 7 and Day 20 post activation with IL-2 and TransAct media.

[0737] 2. Comparing Anti-MUC1* CAR T Cell Activity in the Presence or Absence of Exogenous Cleavage Enzymes

[0738] Human T cells (ALLCELLS) were transduced with huMNC2-CAR44 or huMNC2-CAR50. CAR44 is huMNC2-scFv-CD8-CD8 (transmembrane-41BB-3z). CAR50 is the same as CAR44 except that CAR50 has a murine MNC2-scFv and a CD4 transmembrane domain. The CAR T cells were incubated for 18 hours with target and non-target cells that have been dyed red using CMTMR. When T cells recognize a target cell, they cluster the target cells and begin to kill them. As can be seen in FIGS. 45-47 the CAR T cells effectively cluster and kill the target MUC1* positive cancer cells. FIG. 45 shows huMNC2-CAR44 or huMNC2-CAR50 T cells being co-cultured with HCT-116 cells transduced to express MUC1*, “HCT-MUC1*” or with HCT-116 cells transduced with a full-length MUC1, “HCT-MUC1-41TR”. Recall that MNC2 recognizes an ectopic epitope that is only revealed after cleavage and release of the MUC1 tandem repeat domain. Neither huMNC2-CAR44 nor huMNC2-CAR50 T cells recognize the cells expressing full-length MUC1 (FIG. 45F-45H). However, when MMP9 plus activator APMA is added, the CAR T cells recognize the cells, cluster and kill them (FIG. 45J-45L). The addition of cleavage enzyme ADAM-17 did not affect the recognition of either CAR T cell for full-length MUC1 (FIG. 45N-45P). The reason could be that ADAM-17 doesn't cleave MUC1 or the cleavage product is not recognized by MNC2. A similar experiment was performed (FIG. 46) that showed that MMP2 was only weakly effective at either cleavage MUC1 or that the MMP2 cleavage product was only weakly recognized by MNC2. FIG. 47 shows the contrast between huMNC2-CAR44 recognition of HCT-MUC1* cells, T47D-wt breast cancer cells, and T47D cells with added MMP9 which presumably cleaves the full-length MUC1 to an MNC2 recognizable MUC1*.

[0739] 3. Confocal Imaging of CAR T Cells Giving the “Kiss of Death” to MUC1* Positive Cancer Cells.

[0740] Confocal images of Human T cells that were transduced with huMNC2-CAR44, co-cultured for 24 hours with MUC1* positive DU145 prostate cancer cells showed the CAR T cells inserting Granzyme B into the target cancer cells. FIG. 55 shows fluorescent images of the huMNC2-CAR44 T cells secreting Granzyme B when co-cultured with the prostate cancer cells, FACS analysis showing increased expression of Granzyme B by the CAR T cells and an xCELLigence experiment showing that the target prostate cancer cells were in fact killed.

[0741] 5. Analysis of CAR T Cell Induced Killing of MUC1* Positive Cancer Cells by FACS Analysis

[0742] We have demonstrated the killing effect of huMNC2-CAR44 T cells on T47D MUC1* positive breast cancer cells, wherein the breast cancer cells have been transfected with increasing amounts of additional MUC1*. The killing effect of the huMNC2-CAR44 T cells increases as the amount of target MUC1* expressed on the cells increases.

[0743] IFN-γ secretion in media was measured using a human IFN-γ ELISA kit (Biolegend). Plates were coated with an anti-IFN-γ antibody (capture antibody, 1× in coating buffer). After overnight incubation at 4° C., the plate was washed 4 times with PBS-T and blocking solution was added to block remaining binding site on the well. After 1h at RT (shaking at 500 rpm) the plate was washed 4 times with PBS-T and conditioned media (CM) and IFN-γ standard, was added. After 2h at RT with shaking, the plate was washed 4 times with PBS-T and detection antibody (1×), was added. After 1 h at RT with shaking, the plate was washed 4 times with PBS-T and Avidin-HRP (1×) was added. After 30 min at RT with shaking, the plate was washed 5 times with PBS-T (soak 1 min each wash) and TMB substrate solution was added. The reaction was stopped after 20 min by adding the stop solution and absorbance was read at 450 nm (minus absorbance at 570 nm) within 15 min of stopping.

[0744] 6. Analysis of CAR T Cell Induced Killing of MUC1* Positive Cancer Cells by xCELLigence

[0745] In addition to FACS analysis, many researchers now use an xCELLigence instrument to measure CAR T killing of cancer cells. The xCELLigence instrument uses electrode arrays upon which cancer cells are plated. The adherent cancer cells insulate the electrode and so cause an increase in impedance as they grow. Conversely, T cells are not adherent and remain in suspension so do not contribute to insulation of the electrode which would increase impedance. However, if the T cells or CAR T cells kill the cancer cells on the electrode plate, the cancer cells ball up and float off as they die, which causes the impedance to decrease. The xCELLigence instrument measures impedance as a function of time, which is correlated to cancer cell killing. In addition, the electrode plates also have a viewing window. When CAR T cells effectively kill the adsorbed target cancer cells, there is a decrease in impedance but also one can see that there are no cancer cells left on the plate surface.

[0746] In most of the XCELLigence experiments, 5,000 cancer cells were plated per well of a 96-well electrode array plate. Cells were allowed to adhere and grow for 24 hours. CAR T cells were then added at an Effector to Target ratio (E:T) of 0.5:1, 1:1, 2:1, 5:1, 10:1 and sometimes 20:1. The E:T ratio assumes 100% transduction of the CAR into the T cells, when the actual transduction efficiency is 40%.

[0747] The xCELLigence instrument records impedance as a function of time and experiments can go on for up to 7 days.

[0748] FIG. 48, FIG. 49, FIG. 55H, FIG. 56H, FIGS. 57A-57C, all show results of CAR T and cancer cell experiments performed on an xCELLigence instrument.

[0749] 7. Anti-MUC1* CAR T Cell Therapy in Mice Bearing Human Tumors

[0750] Female NOD/SCID/GAMMA (NSG) mice between 8-12 weeks of age were implanted with 500,000 human cancer cells, wherein the cancer cells had previously been stably transfected with Luciferase. Mice bearing Luciferase positive cells can be injected with the enzyme's substrate Luciferin just prior to imaging, which makes the cancer cells fluoresce. The cancer cells are imaged in live mice within 10-15 minutes after injection with Luciferin on an IVIS instrument. The readout is flux or photons per second. Tumors were allowed to engraft until tumors were clearly visible by IVIS.

[0751] FIGS. 58A-58F show fluorescent photographs of mice taken on an IVIS instrument. 10 minutes prior to IVIS photographs, mice were injected intraperitoneally (IP) with Luciferin, which fluoresces after cleavage by Luciferase, thus making tumor cells fluoresce. NSG (NOD/SCID/GAMMA) immune compromised mice that on Day 0 were subcutaneously implanted on the flank with 500,000 human MUC1* positive cancer cells that had been stably transfected with Luciferase. Tumors were allowed to engraft. On Day 7 after IVIS measurement, animals were tail vein injected with either PBS, 10 million untransduced human T cells or 8.5M huMNC2-scFv-CAR44 T cells. As can be seen in the figure, control mice had to be sacrificed on Day 20 due to excess tumor burden (FIG. 58A-58B). huMNC2-CAR44 T cell treated mice were tumor free after a single CAR T cell injection until Day 100 when they were sacrificed (FIG. 58C). FIG. 58E shows Kaplan-Meier survival curves that demonstrate the efficacy of T cell therapy guided by anti-MUC1* antibody. FIG. 58F shows a table summarizing the characteristics of the human T cells that were collected from the test mice upon sacrifice. The starting Car T cell population was 50% CD4 positive helper T cells and 50% CD8 positive killer T cells. As can be seen in the table, the percent of CD8 positive cells has increased in the CAR T treated group, indicating in vivo expansion of that group of cells, which is an indicator of efficacy. We also note that in the treated group, the CAR T cells express higher levels of PD1 which is a marker of T cell exhaustion.

[0752] In another animal experiment, NSG mice were sub-cutaneously implanted into the flank with 500,000 tumor cells then injected on Day 7 and again on Day 14 with either saline solution, PBS, or 10M huMNC2-CAR44 T cells (FIG. 59A-59C). In this experiment the amount of MUC1* expressed on the tumor cells was varied. In one case, the tumor cells that were implanted were T47D-wildtype (FIG. 59B). In another case, the T47D cells were doped with 95% T47D cells that had been transfected to express even more MUC1* (FIG. 59C). As can be seen, the tumors comprised of cells expressing more MUC1* were eliminated more quickly and did not recur. In a similar experiment, the tumor cells were doped with a relatively small amount of cells that expressed more MUC1*. FIG. 60A-60C shows NSG mice implanted with T47D-wt breast cancer cells that have been doped with 30% of T47D cells transfected to express more MUC1*. As can be seen, even a small percentage of cells expressing high levels of MUC1* is sufficient to trigger CAR T cell mediated killing of the entire tumor. Naturally occurring tumors are heterogeneous and are comprised of both high and low antigen expressing cells. This experiment indicates that huMNC2-CAR44 T cells would be effective in eradicating naturally occurring tumors.

[0753] FIGS. 61A-61J show fluorescent photographs of mice taken on an IVIS instrument. NSG (NOD/SCID/GAMMA) immune compromised mice that on Day 0 were subcutaneously injected into the flank with 500K human BT-20 cells which are a MUC1* positive triple negative breast cancer cell line. The cancer cells had been stably transfected with Luciferase. Tumors were allowed to engraft. On Day 6 after IVIS measurement, animals were given a one-time injection of 10 million of either human T cells transduced with huMNC2-scFv-CAR44 or untransduced T cells. 5 million T cells were injected intra-tumor and 5 million were injected into the tail vein. 10 minutes prior to IVIS photographs, mice were IP injected with Luciferin. In one case the huMNC2-CAR44 T cells were first incubated with beads to which was attached the PSMGFR peptide to pre-stimulate the T cells and in the figure is marked Protocol 1. In Protocol 2, the huMNC2-CAR44 T cells were pre-stimulated with live tumor cells, which likely injected more tumor cells into the animals' circulation.

[0754] FIGS. 62A-62M show fluorescent photographs of mice taken on an IVIS instrument. NSG (NOD/SCID/GAMMA) immune compromised mice that on Day 0 were injected into the intraperitoneal cavity (IP) with 500K human SKOV-3 cells which are a MUC1* positive ovarian cancer cell line. The cancer cells had been stably transfected with Luciferase. Tumors were allowed to engraft. On Day 3 after IVIS measurement, animals were IP injected with 10M either human T cells transduced with huMNC2-CAR44 T cells, untransduced T cells or PBS. Animals were IVIS imaged again on Day 7. 10 minutes prior to IVIS photographs, mice were IP injected with Luciferin. As can be seen in the figure the anti-MUC1* CAR T cells effectively reduced ovarian tumor volume by Day 15.

[0755] 9. NFAT-Induced IL-18 Sequences and Cloning

[0756] Cloning of IL18 in pGL4-14 3×NFAT:

[0757] An activated IL18 (SEQ ID NO:1644) was synthesized with the CD8 leader sequence. The pGL4-14 3×IL2 NFAT and pGL4-14 3×FoxP3 NFAT were digested with XhoI and HindIII restriction enzymes (New England Biolabs). The purified plasmids and the synthesized IL18 sequences were assembled using the Gibson assembly cloning kit (New England Biolab). The resulting constructs (pGL4-14 3×IL2NFAT-IL18 and pGL4-14 3×FoxP3NFAT-IL18) contains 3 repeats of NFAT response element (IL2 or FoxP3) followed by a minimum promoter (mCMV: SEQ ID NO:1634) and IL18 (SEQ ID NOS:1752-1753) with CD8 leader sequence.

[0758] Cloning of MNC2 CAR with IL18 in pCDNA Vector:

[0759] MNC2 CAR sequence was amplified from previously made vector by polymerase chain reaction (PCR) using the following primers: 5′-agggagacccaagctggctagttaagcttggatggccttaccagtgaccgccttgc-3′ (SEQ ID NO:1754) and 5′-taggccagagaaatgttctggcattatcagcgagggggcagggcctgc-3′ (SEQ ID NO:1755).

[0760] IL18 sequence including NFAT response element was amplify from pGL4-14 3×NFAT-IL18 by polymerase chain reaction (PCR) using the following primers: 5′-tgccagaacatttctctgg-3′ (SEQ ID NO:1756) and 5′-acagtcgaggctgatcagcgggtttaaacttatcagtcctcgttctgcacgg-3′ (SEQ ID NO: 1757). The purified PCR fragments and digested pCDNA 3.1 V5 (ThermoFisher scientific) were assembled using the Gibson assembly cloning kit (New England Biolab) to create the construct pCDNA MNC2CAR-3×IL2NFAT-IL18 and pCDNA MNC2CAR-3×FoxP3NFAT-IL18.

[0761] Cloning of MNC2 CAR-NFAT-IL18 in Lentivector:

[0762] MNC2 CAR-NFAT-IL18 sequence was amplified from pCDNA MNC2CAR-3×IL2NFAT-IL18 and pCDNA MNC2CAR-3×FoxP3NFAT-IL18.by polymerase chain reaction (PCR) using the following primers: 5′-atgcaggccctgccccctcgctgataagtttaaactgccagaacatttctctggcctaac-3′ (SEQ ID NO:1758) and 5′-accggagcgatcgcagatccttcgcggccgcttatcagtcctcgttctgcacggtgaac-3′ (SEQ ID NO:1759). The purified PCR fragments and digested pCDH Dual Hygro (System Biosciences, CA) were assembled using the Gibson assembly cloning kit (New England Biolab) to create the construct pCDH MNC2CAR-3×IL2NFAT-IL18 and pCDH MNC2CAR-3×FoxP3NFAT-IL18.

[0763] Creation of lentivector with MSCV promoter

[0764] MSCV promoter sequence was amplified from pCDH-MSCV-MCS-EFla-GFP (System Biosciences) by polymerase chain reaction (PCR) using the following primers: 5′-attgcactagttgaaagaccccacctgtagg-3′ (SED ID NO:1760) and 5′-aatgctctagaatacgggtatccagg-3′ (SEQ ID NO:1761). After digestion with SpeI and XbaI restriction enzymes (New England Biolabs), the purified fragment was cloned into pCDH CMV MCS (System Bioscience) digested with the same restriction enzymes to create the construct pCDH MSCV MCS.

[0765] Cloning of MNC2 CAR-NFAT-IL18 in pCDH MSCV MCS:

[0766] MNC2 CAR-IL2NFAT-IL18 sequence was amplified from pCDNA MNC2CAR-3×IL2NFAT-IL18 by polymerase chain reaction (PCR) using the following primers: 5′ atagcgaattcgtaccgagggccaccatgg-3′ (SEQ ID NO:1762) and 5′-taggcctcccaccgtacacgcctaggtaccacgccttctgtatg-3′ (SEQ ID NO:1763) MNC2 CAR-IL2NFAT-IL18 sequence was amplified from pCDNA MNC2CAR-3×FoxP3NFAT-IL18 by polymerase chain reaction (PCR) using the following primers: 5′ atagcgaattcgtaccgagggccaccatgg -3′ (SEQ ID NO:1762) and 5′-taggcctcccaccgtacacgcctaggtacctctgcagtaaatgg-3′ (SEQ ID NO:1764). After digestion with EcoRI and KpnI restriction enzymes (New England Biolabs), the purified fragment was cloned into pCDH MSCV MCS digested with the same restriction enzymes to create the construct pCDH MSCV MNC2CAR-3×IL2NFAT-IL18 and pCDH MSCV MNC2CAR-3×FoxP3NFAT-IL18.

[0767] Cloning of 6×NFAT Response Elements:

[0768] 6×NFAT (IL2 and FoxP3) response element were synthesized followed by different minimal promoter: mCMV (SEQ ID NO:1634), mIL2P (SEQ ID NO:1635) and miniP (SEQ ID NO:1636). A total of six 6 sequences were synthesized: SEQ ID NOS: 1768-1779.

[0769] 6×NFAT sequences were amplified by polymerase chain reaction (PCR) using the following primers: 5′-tgccagaacatttctctgg-3′ (SEQ ID NO:1756) and 5′-taaggccatggtggctagc-3′ (SEQ ID NO:1765). The purified PCR fragments and digested (KpnI and XhoI) pCDNA MNC2CAR 3XNFAT IL18 were assembled using the Gibson assembly cloning kit (New England Biolab) to create constructs with 6×NFAT response elements in place of the 3×NFAT response elements.

[0770] 6×NFAT sequences were amplified, from the pCDNA vector created above, by polymerase chain reaction (PCR) using the following primers: 5′-aataagtttaaactgccagaacatttctctgg-3′ (SEQ ID NO:1766) and 5′-atatagcggccgcttatcagtcctcgttctgcacgg-3′ (SEQ ID NO:1767). After digestion with PmeI and NotI restriction enzymes (New England Biolabs), the purified fragments were cloned into pCDH MSCV MNC2CAR digested with the same restriction enzymes to create the construct pCDH MSCV MNC2CAR-6×IL2NFAT-IL18 and pCDH MSCV MNC2CAR-6×FoxP3NFAT-IL18. For each construct 3 minimal promoter were tested.

[0771] Sequence Listing Free Text

[0772] As regards the use of nucleotide symbols other than a, g, c, t, they follow the convention set forth in WIPO Standard ST.25, Appendix 2, Table 1, wherein k represents t or g; n represents a, c, t or g; m represents a or c; r represents a or g; s represents c or g; w represents a or t and y represents c or t.

MUC1 Receptor
(Mucin 1 precursor, Genbank Accession number: P15941)
(SEQ ID NO: 1)
MTPGTQSPFELLLLLTVLTVVTGSGHASSTPGGEKETSATQRSSVPSSTEKNAVSMTSSVLSSHSPGSGSSTTQGQD
VTLAPATEPASGSAATWGQDVTSVPVTRPALGSTTPPAHDVTSAPDNKPAPGSTAPPAHGVTSAPDTRPAPGSTAPP
AHGVTSAPDTRPAPGSTAPPAHGVTSAPDTRPAPGSTAPPAHGVTSAPDTRPAPGSTAPPAHGVTSAPDTRPAPGST
APPAHGVTSAPDTRPAPGSTAPPAHGVTSAPDTRPAPGSTAPPAHGVTSAPDTRPAPGSTAPPAHGVTSAPDTRPAP
GSTAPPAHGVTSAPDTRPAPGSTAPPAHGVTSAPDTRPAPGSTAPPAHGVTSAPDTRPAPGSTAPPAHGVTSAPDTR
PAPGSTAPPAHGVTSAPDTRPAPGSTAPPAHGVTSAPDTRPAPGSTAPPAHGVTSAPDTRPAPGSTAPPAHGVTSAP
DTRPAPGSTAPPAHGVTSAPDTRPAPGSTAPPAHGVTSAPDTRPAPGSTAPPAHGVTSAPDTRPAPGSTAPPAHGVT
SAPDTRPAPGSTAPPAHGVTSAPDTRPAPGSTAPPAHGVTSAPDTRPAPGSTAPPAHGVTSAPDTRPAPGSTAPPAH
GVTSAPDTRPAPGSTAPPAHGVTSAPDTRPAPGSTAPPAHGVTSAPDTRPAPGSTAPPAHGVTSAPDTRPAPGSTAP
PAHGVTSAPDTRPAPGSTAPPAHGVTSAPDTRPAPGSTAPPAHGVTSAPDTRPAPGSTAPPAHGVTSAPDTRPAPGS
TAPPAHGVTSAPDTRPAPGSTAPPAHGVTSAPDTRPAPGSTAPPAHGVTSAPDTRPAPGSTAPPAHGVTSAPDTRPA
PGSTAPPAHGVTSAPDTRPAPGSTAPPAHGVTSAPDTRPAPGSTAPPAHGVTSAPDTRPAPGSTAPPAHGVTSAPDT
RPAPGSTAPPAHGVTSAPDNRPALGSTAPPVHNVTSASGSASGSASTLVHNGTSARATTTPASKSTPFSIPSHHSDT
PTTLASHSTKTDASSTHHSSVPPLTSSNHSTSPQLSTGVSFFELSFHISNLQFNSSLEDPSTDYYQELQRDISEMEL
QTYKQGGFLGLSNIKFRPGSVVVQLTLAFREGTINVHDVETQFNQYKTEAASRYNLTISDVSVSDVPFPFSAQSGAG
VPGWGIALLVLVCVLVALAIVYLIALAVCQCRRKNYGQLDIFPARDTYHPMSEYPTYHTHGRYVPPSSTDRSPYEKV
SAGNGGSSLSYTNPAVAAASANL
PSMGFR
(SEQ ID NO: 2)
GTINVHDVETQFNQYKTEAASRYNLTISDVSVSDVPFPFSAQSGA
N-10 peptide
(SEQ ID NO: 3)
QFNQYKTEAASRYNLTISDVSVSDVPFPFSAQSGA
N-19
(SEQ ID NO: 4)
ASRYNLTISDVSVSDVPFPFSAQSGA
N-23
(SEQ ID NO: 5)
NLTISDVSVSDVPFPFSAQSGA
N-26
(SEQ ID NO: 6)
ISDVSVSDVPFPFSAQSGA
N-30
(SEQ ID NO: 7)
SVSDVPFPFSAQSGA
N-10/C-5
(SEQ ID NO: 8)
QFNQYKTEAASRYNLTISDVSVSDVPFPFS
N-19/C-5
(SEQ ID NO: 9)
ASRYNLTISDVSVSDVPFPFS
N-36
(SEQ ID NO: 10)
FPFSAQSGA
Mouse E6 Heavy chain variable region sequence:
(DNA)
(SEQ ID NO: 12)
gaggtgaaggtggtggagtctgggggagacttagtgaagcctggagggtccctgaaactctcctgtgtagtctctgg
attcactttcagtagatatggcatgtcttgggttcgccagactccaggcaagaggctggagtgggtcgcaaccatta
gtggtggcggtacttacatctactatccagacagtgtgaaggggcgattcaccatctccagagacaatgccaagaac
accctgtacctgcaaatgagcagtctgaagtctgaggacacagccatgtatcactgtacaagggataactacggtag
gaactacgactacggtatggactactggggtcaaggaacctcagtcaccgtctcctca
(amino acids)
(SEQ ID NO: 13)
EVKVVESGGDLVKPGGSLKLSCVVSGFTESRYGMSWVRQTPGKRLEWVATISGGGTYIYYPDSVKGRFTISRDNAKN
TLYLQMSSLKSEDTAMYHCTRDNYGRNYDYGMDYWGQGTSVTVSS
Mouse E6 heavy chain variable framework region 1 (FWR1) sequence:
(DNA)
(SEQ ID NO: 14)
gaggtgaaggtggtggagtctgggggagacttagtgaagcctggagggtccctgaaactctcctgtgtagtctct
(amino acids)
(SEQ ID NO: 15)
EVKVVESGGDLVKPGGSLKLSCVVSGFTFS
Mouse E6 heavy chain variable complementarity determining region 1 (CDR1)
sequence:
(DNA)
(SEQ ID NO: 16)
ggattcactttcagtagatatggcatgtct
(amino acids)
(SEQ ID NO: 17)
RYGMS
Mouse E6 heavy chain variable framework region 2 (FWR2) sequence:
(DNA)
(SEQ ID NO: 18)
tgggttcgccagactccaggcaagaggctggagtgggtcgca
(amino acids)
(SEQ ID NO: 19)
WVRQTPGKRLEWVA
Mouse E6 heavy chain variable complementarity determining regions 2 (CDR2)
sequence:
(DNA)
(SEQ ID NO: 20)
accattagtggtggcggtacttacatctactatccagacagtgtgaagggg
(amino acids)
(SEQ ID NO: 21)
TISGGGTYIYYPDSVKG
Mouse E6 heavy chain variable framework region 3 (FWR3) acid sequence:
(DNA)
(SEQ ID NO: 22)
cgattcaccatctccagagacaatgccaagaacaccctgtacctgcaaatgagcagtctgaagtctgaggacacagc
catgtatcactgtacaagg
(amino acids)
(SEQ ID NO: 23)
RFTISRDNAKNTLYLQMSSLKSEDTAMYHCTR
Mouse E6 heavy chain variable complementarity determining regions 3 (CDR3)
sequence:
(DNA)
(SEQ ID NO: 24)
gataactacggtaggaactacgactacggtatggactac
(amino acids)
(SEQ ID NO: 25)
DNYGRNYDYGMDY
Humanized E6 heavy chain variable region sequence from IGHV3-21*03:
(DNA)
(SEQ ID NO: 38)
gaggtgcagctggtggagtctgggggaggcctggtcaagcctggggggtccctgagactctcctgtgcagcctctgg
attcaccttcagtaggtatggcatgagctgggtccgccaggctccagggaagaggctggagtgggtctcaaccatta
gtggcggaggcacctacatatactacccagactcagtgaagggccgattcaccatctccagagacaacgccaagaac
accctgtatctgcaaatgaacagcctgagagccgaggacacggctgtgtattactgtaccagagataactatggccg
caactatgattatggcatggattattggggccagggcaccctggtgaccgtgagcagc
(amino acids)
(SEQ ID NO: 39)
EVQLVESGGGLVKPGGSLRLSCAASGFTFSRYGMSWVRQAPGKRLEWVSTISGGGTYIYYPDSVKGRFTISRDNAKN
TLYLQMNSLRAEDTAVYYCTRDNYGRNYDYGMDYWGQGTLVTVSS
Humanized E6 heavy chain variable framework region 1 (FWR1) acid sequence:
(DNA)
(SEQ ID NO: 40)
gaggtgcagctggtggagtctgggggaggcctggtcaagcctggggggtccctgagactctcctgtgcagcctctgg
attcaccttcagt
(amino acids)
(SEQ ID NO: 41)
EVQLVESGGGLVKPGGSLRLSCAASGFTFS
Humanized E6 heavy chain variable complementarity determining regions 1 (CDR1)
sequence:
(DNA)
(SEQ ID NO: 42)
aggtatggcatgagc
(amino acids)
(SEQ ID NO: 43)
RYGMS
Humanized E6 heavy chain variable framework region 2 (FWR2) acid sequence:
(DNA)
(SEQ ID NO: 44)
tgggtccgccaggctccagggaagaggctggagtgggtctca
(amino acids)
(SEQ ID NO: 45)
WVRQAPGKRLEWVS
Humanized E6 heavy chain variablecomplementarity determining regions 2
(CDR2) sequence:
(DNA)
(SEQ ID NO: 46)
accattagtggcggaggcacctacatatactacccagactcagtgaagggc
(amino acids)
(SEQ ID NO: 47)
TISGGGTYIYYPDSVKG
Humanized E6 heavy chain variable framework region 3 (FWR3) acid sequence:
(DNA)
(SEQ ID NO: 48)
cgattcaccatctccagagacaacgccaagaacaccctgtatctgcaaatgaacagcctgagagccgaggacacggc
tgtgtattactgtaccaga
(amino acids)
(SEQ ID NO: 49)
RFTISRDNAKNTLYLQMNSLRAEDTAVYYCTR
Humanized E6 heavy chain variable complementarity determining regions 3
(CDR3) sequence:
(DNA)
(SEQ ID NO: 50)
gataactatggccgcaactatgattatggcatggattat
(amino acids)
(SEQ ID NO: 51)
DNYGRNYDYGMDY
Humanized E6 IgG2 heavy chain synthesized by Genescript:
(DNA)
(SEQ ID NO: 52)
gaattctaagcttgggccaccatggaactggggctccgctgggttttccttgttgctattttagaaggtgtccagtg
tgaggtgcagctggtggagtctgggggaggcctggtcaagcctggggggtccctgagactctcctgtgcagcctctg
gattcaccttcagtaggtatggcatgagctgggtccgccaggctccagggaagaggctggagtgggtctcaaccatt
agtggcggaggcacctacatatactacccagactcagtgaagggccgattcaccatctccagagacaacgccaagaa
caccctgtatctgcaaatgaacagcctgagagccgaggacacggctgtgtattactgtaccagagataactatggcc
gcaactatgattatggcatggattattggggccagggcaccctggtgaccgtgagcagcgcctccaccaagggccca
tcggtcttccccctggcgccctgctccaggagcacctccgagagcacagccgccctgggctgcctggtcaaggacta
cttccccgaaccggtgacggtgtcgtggaactcaggcgctctgaccagcggcgtgcacaccttcccagctgtcctac
agtcctcaggactctactccctcagcagcgtggtgaccgtgccctccagcaacttcggcacccagacctacacctgc
aacgtagatcacaagcccagcaacaccaaggtggacaagacagttgagcgcaaatgttgtgtcgagtgcccaccgtg
cccagcaccacctgtggcaggaccgtcagtcttcctcttccccccaaaacccaaggacaccctcatgatctcccgga
cccctgaggtcacgtgcgtggtggtggacgtgagccacgaagaccccgaggtccagttcaactggtacgtggacggc
gtggaggtgcataatgccaagacaaagccacgggaggagcagttcaacagcacgttccgtgtggtcagcgtcctcac
cgttgtgcaccaggactggctgaacggcaaggagtacaagtgcaaggtctccaacaaaggcctcccagcccccatcg
agaaaaccatctccaaaaccaaagggcagccccgagaaccacaggtgtacaccctgcccccatcccgggaggagatg
accaagaaccaggtcagcctgacctgcctggtcaaaggcttctaccccagcgacatcgccgtggagtgggagagcaa
tgggcagccggagaacaactacaagaccacacctcccatgctggactccgacggctccttcttcctctacagcaagc
tcaccgtggacaagagcaggtggcagcaggggaacgtcttctcatgctccgtgatgcatgaggctctgcacaaccac
tacacgcagaagagcctctccctgtctccgggtaaatagtaagtttaaactctaga
(amino acids)
(SEQ ID NO: 53)
EF*AWATMELGLRWVFLVAILEGVQCEVQLVESGGGLVKPGGSLRLSCAASGFTFSRYGMSWVRQAPGKRLEWVSTI
SGGGTYIYYPDSVKGRFTISRDNAKNTLYLQMNSLRAEDTAVYYCTRDNYGRNYDYGMDYWGQGTLVTVSSASTKGP
SVFPLAPCSRSTSESTAALGCLVKDYFPEPVTVSWNSGALTSGVHTFPAVLQSSGLYSLSSVVTVPSSNFGTQTYTC
NVDHKPSNTKVDKTVERKCCVECPPCPAPPVAGPSVFLFPPKPKDTLMISRTPEVTCVVVDVSHEDPEVQFNWYVDG
VEVHNAKTKPREEQFNSTFRVVSVLTVVHQDWLNGKEYKCKVSNKGLPAPIEKTISKTKGQPREPQVYTLPPSREEM
TKNQVSLTCLVKGFYPSDIAVEWESNGQPENNYKTTPPMLDSDGSFFLYSKLTVDKSRWQQGNVFSCSVMHEALHNH
YTQKSLSLSPGK**V*TLX
Human IgG2 heavy chain constant region sequence:
(DNA)
(SEQ ID NO: 54)
gcctccaccaagggcccatcggtcttccccctggcgccctgctccaggagcacctccgagagcacagccgccctggg
ctgcctggtcaaggactacttccccgaaccggtgacggtgtcgtggaactcaggcgctctgaccagcggcgtgcaca
ccttcccagctgtcctacagtcctcaggactctactccctcagcagcgtggtgaccgtgccctccagcaacttcggc
acccagacctacacctgcaacgtagatcacaagcccagcaacaccaaggtggacaagacagttgagcgcaaatgttg
tgtcgagtgcccaccgtgcccagcaccacctgtggcaggaccgtcagtcttcctcttccccccaaaacccaaggaca
ccctcatgatctcccggacccctgaggtcacgtgcgtggtggtggacgtgagccacgaagaccccgaggtccagttc
aactggtacgtggacggcgtggaggtgcataatgccaagacaaagccacgggaggagcagttcaacagcacgttccg
tgtggtcagcgtcctcaccgttgtgcaccaggactggctgaacggcaaggagtacaagtgcaaggtctccaacaaag
gcctcccagcccccatcgagaaaaccatctccaaaaccaaagggcagccccgagaaccacaggtgtacaccctgccc
ccatcccgggaggagatgaccaagaaccaggtcagcctgacctgcctggtcaaaggcttctaccccagcgacatcgc
cgtggagtgggagagcaatgggcagccggagaacaactacaagaccacacctcccatgctggactccgacggctcct
tcttcctctacagcaagctcaccgtggacaagagcaggtggcagcaggggaacgtcttctcatgctccgtgatgcat
gaggctctgcacaaccactacacgcagaagagcctctccctgtctccgggtaaatag
(amino acids)
(SEQ ID NO: 55)
ASTKGPSVFPLAPCSRSTSESTAALGCLVKDYFPEPVTVSWNSGALTSGVHTFPAVLQSSGLYSLSSVVTVPSSNFG
TQTYTCNVDHKPSNTKVDKTVERKCCVECPPCPAPPVAGPSVFLFPPKPKDTLMISRTPEVTCVVVDVSHEDPEVQF
NWYVDGVEVHNAKTKPREEQFNSTFRVVSVLTVVHQDWLNGKEYKCKVSNKGLPAPIEKTISKTKGQPREPQVYTLP
PSREEMTKNQVSLTCLVKGFYPSDIAVEWESNGQPENNYKTTPPMLDSDGSFFLYSKLTVDKSRWQQGNVFSCSVMH
EALHNHYTQKSLSLSPGK
HumanizedE6 IgG1 heavy chain sequence:
(DNA)
(SEQ ID NO: 56)
gaggtgcagctggtggagtctgggggaggcctggtcaagcctggggggtccctgagactctcctgtgcagcctctgg
attcaccttcagtaggtatggcatgagctgggtccgccaggctccagggaagaggctggagtgggtctcaaccatta
gtggcggaggcacctacatatactacccagactcagtgaagggccgattcaccatctccagagacaacgccaagaac
ccactgtatctgcaaatgaacagcctgagagccgaggacacggctgtgtattactgtcccagagataactatggccg
caactatgattatggcatggattattggggccagggcaccctggtgaccgtgagcagcgctagcaccaagggcccat
cggtcttccccctggcaccctcctccaagagcacctctgggggcacagcggccctgggctgcctggtcaaggactac
ttccccgaaccggtgacggtgtcgtggaactcaggcgccctgaccagcggcgtgcacaccttcccggctgtcctaca
gtcctcaggactctactccctcagcagcgtggtgacagtgccctccagcagcttgggcacccagacctacatctgca
acgtgaatcacaagcccagcaacaccaaggtggacaagaaagttgagcccaaatcttgtgacaaaactcacacatgc
ccaccgtgcccagcacctgaactcctggggggaccgtcagtcttcctcttccccccaaaacccaaggacaccctcat
gatctcccggacccctgaggtcacatgcgtggtggtggacgtgagccacgaagaccctgaggtcaagttcaactggt
acgtggacggcgtggaggtgcataatgccaagacaaagccgcgggaggagcagtacaacagcacgtaccgtgtggtc
agcgtcctcaccgtcctgcaccaggactggctgaatggcaaggagtacaagtgcaaggtctccaacaaagccctccc
agcccccatcgagaaaaccatctccaaagccaaagggcagccccgagaaccacaggtgtacaccctgcccccatccc
gggaggagatgaccaagaaccaggtcagcctgacctgcctggtcaaaggcttctatcccagcgacatcgccgtggag
tgggagagcaatgggcagccggagaacaactacaagaccacgcctcccgtgctggactccgacggctccttcttcct
ctacagcaagctcaccgtggacaagagcaggtggcagcaggggaacgtcttctcatgctccgtgatgcatgaggctc
tgcacaaccactacacgcagaagagcctctccctgtctccgggtaaatgataa
(amino acids)
(SEQ ID NO: 57)
EVQLVESGGGLVKPGGSLRLSCAASGFTFSRYGMSWVRQAPGKRLEWVSTISGGGTYIYYPDSVKGRFTISRDNAKN
PLYLQMNSLRAEDTAVYYCPRDNYGRNYDYGMDYWGQGTLVTVSSASTKGPSVFPLAPSSKSTSGGTAALGCLVKDY
FPEPVTVSWNSGALTSGVHTFPAVLQSSGLYSLSSVVTVPSSSLGTQTYICNVNHKPSNTKVDKKVEPKSCDKTHTC
PPCPAPELLGGPSVFLFPPKPKDTLMISRTPEVTCVVVDVSHEDPEVKFNWYVDGVEVHNAKTKPREEQYNSTYRVV
SVLTVLHQDWLNGKEYKCKVSNKALPAPIEKTISKAKGQPREPQVYTLPPSREEMTKNQVSLTCLVKGFYPSDIAVE
WESNGQPENNYKTTPPVLDSDGSFFLYSKLTVDKSRWQQGNVFSCSVMHEALHNHYTQKSLSLSPGK**
Human IgG1 heavy chain constant region sequence:
(DNA)
(SEQ ID NO: 58)
gctagcaccaagggcccatcggtcttccccctggcaccctcctccaagagcacctctgggggcacagcggccctggg
ctgcctggtcaaggactacttccccgaaccggtgacggtgtcgtggaactcaggcgccctgaccagcggcgtgcaca
ccttcccggctgtcctacagtcctcaggactctactccctcagcagcgtggtgacagtgccctccagcagcttgggc
acccagacctacatctgcaacgtgaatcacaagcccagcaacaccaaggtggacaagaaagttgagcccaaatcttg
tgacaaaactcacacatgcccaccgtgcccagcacctgaactcctggggggaccgtcagtcttcctcttccccccaa
aacccaaggacaccctcatgatctcccggacccctgaggtcacatgcgtggtggtggacgtgagccacgaagaccct
gaggtcaagttcaactggtacgtggacggcgtggaggtgcataatgccaagacaaagccgcgggaggagcagtacaa
cagcacgtaccgtgtggtcagcgtcctcaccgtcctgcaccaggactggctgaatggcaaggagtacaagtgcaagg
tctccaacaaagccctcccagcccccatcgagaaaaccatctccaaagccaaagggcagccccgagaaccacaggtg
tacaccctgcccccatcccgggaggagatgaccaagaaccaggtcagcctgacctgcctggtcaaaggcttctatcc
cagcgacatcgccgtggagtgggagagcaatgggcagccggagaacaactacaagaccacgcctcccgtgctggact
ccgacggctccttcttcctctacagcaagctcaccgtggacaagagcaggtggcagcaggggaacgtcttctcatgc
tccgtgatgcatgaggctctgcacaaccactacacgcagaagagcctctccctgtctccgggtaaatgataa
(amino acids)
(SEQ ID NO: 59)
ASTKGPSVFPLAPSSKSTSGGTAALGCLVKDYFPEPVTVSWNSGALTSGVHTFPAVLQSSGLYSLSSVVTVPSSSLG
TQTYICNVNHKPSNTKVDKKVEPKSCDKTHTCPPCPAPELLGGPSVFLFPPKPKDTLMISRTPEVTCVVVDVSHEDP
EVKFNWYVDGVEVHNAKTKPREEQYNSTYRVVSVLTVLHQDWLNGKEYKCKVSNKALPAPIEKTISKAKGQPREPQV
YTLPPSREEMTKNQVSLTCLVKGFYPSDIAVEWESNGQPENNYKTTPPVLDSDGSFFLYSKLTVDKSRWQQGNVFSC
SVMHEALHNHYTQKSLSLSPGK**
Mouse E6 Light Chain variable region sequence:
(DNA)
(SEQ ID NO: 65)
caaattgttctcacccagtctccagcaatcatgtctgcatctccaggggaggaggtcaccctaacctgcagtgccac
ctcaagtgtaagttacatacactggttccagcagaggccaggcacttctcccaaactctggatttatagcacatcca
acctggcttctggagtccctgttcgcttcagtggcagtggatatgggacctcttactctctcacaatcagccgaatg
gaggctgaagatgctgccacttattactgccagcaaaggagtagttccccattcacgttcggctcggggacaaagtt
ggaaataaaa
(amino acids)
(SEQ ID NO: 66)
QIVLTQSPAIMSASPGEEVTLTCSATSSVSYIHWFQQRPGTSPKLWIYSTSNLASGVPVRFSGSGYGTSYSLTISRM
EAEDAATYYCQQRSSSPFTFGSGTKLEIK
Mouse E6 light chain variable framework region 1 (FWR1) sequence:
(DNA)
(SEQ ID NO: 67)
caaattgttctcacccagtctccagcaatcatgtctgcatctccaggggaggaggtcaccctaacctgc
(amino acids)
(SEQ ID NO: 68)
QIVLTQSPAIMSASPGEEVTLTC
Mouse E6 light chain variable complementarity determining regions 1 (CDR1)
sequence:
(DNA)
(SEQ ID NO: 69)
AGTGCCACCTCAAGTGTAAGTTACATACAC
(amino acids)
(SEQ ID NO: 70)
SATSSVSYIH
Mouse E6 light chain variable framework region 2 (FWR2) sequence:
(DNA)
(SEQ ID NO: 71)
tggttccagcagaggccaggcacttctcccaaactctggatttat
(amino acids)
(SEQ ID NO: 72)
WFQQRPGTSPKLWIY
Mouse E6 light chain variable complementarity determining regions 2 (CDR2)
sequence:
(DNA)
(SEQ ID NO: 73)
agcacatccaacctggcttct
(amino acids)
(SEQ ID NO: 74)
STSNLAS
Mouse E6 light chain variable framework region 3 (FWR3) sequence:
(DNA)
(SEQ ID NO: 75)
ggagtccctgttcgcttcagtggcagtggatatgggacctcttactctctcacaatcagccgaatggaggctgaaga
tgctgccacttattactgc
(amino acids)
(SEQ ID NO: 76)
GVPVRFSGSGYGTSYSLTISRMEAEDAATYYC
Mouse E6 light chain variable complementarity determining regions 3 (CDR3)
sequence:
(DNA)
(SEQ ID NO: 77)
cagcaaaggagtagttccccattcacg
(amino acids)
(SEQ ID NO: 78)
QQRSSSPFT
Humanized E6 light chain variable region sequence from IGKV3-11*02:
(DNA)
(SEQ ID NO: 93)
gaaattgtgttgacacagtctccagccaccctgtctttgtctccaggggaaagagccaccctcacctgcagcgccac
cagcagtgttagctacatccactggtaccaacagaggcctggccagagccccaggctcctcatctatagcacctcca
acctggccagcggcatcccagccaggttcagtggcagtgggtctgggagcgactacactctcaccatcagcagccta
gagcctgaagattttgcagtttattactgtcagcagcgtagcagctcccctttcacctttggcagcggcaccaaagt
ggaaattaaa
(amino acids)
(SEQ ID NO: 94)
EIVLTQSPATLSLSPGERATLTCSATSSVSYIHWYQQRPGQSPRLLIYSTSNLASGIPARFSGSGSGSDYTLTISSL
EPEDFAVYYCQQRSSSPFTFGSGTKVEIK
Humanized E6 light chain variable framework region 1 (FWR1) acid sequence:
(DNA)
(SEQ ID NO: 95)
gaaattgtgttgacacagtctccagccaccctgtctttgtctccaggggaaagagccaccctcacctgc
(amino acids)
(SEQ ID NO: 96)
EIVLTQSPATLSLSPGERATLTC
Humanized E6 light chain variable complementarity determining regions 1 (CDR1)
sequence:
(DNA)
(SEQ ID NO: 97)
agcgccaccagcagtgttagctacatccac
(amino acids)
(SEQ ID NO: 98)
SATSSVSYIH
Humanized E6 heavy light variable framework region 2 (FWR2) acid sequence:
(DNA)
(SEQ ID NO: 99)
tggtaccaacagaggcctggccagagccccaggctcctcatctat
(amino acids)
(SEQ ID NO: 100)
WYQQRPGQSPRLLIY
Humanized E6 light chain variable complementarity determining regions 2
(CDR2) sequence:
(DNA)
(SEQ ID NO: 101)
agcacctccaacctggccagc
(amino acids)
(SEQ ID NO: 102)
STSNLAS
Humanized E6 light chain variable framework region 3 (FWR3) acid sequence:
(DNA)
(SEQ ID NO: 103)
ggcatcccagccaggttcagtggcagtgggtctgggagcgactacactctcaccatcagcagcctagagcctgaaga
ttttgcagtttattactgt
(amino acids)
(SEQ ID NO: 104)
GIPARFSGSGSGSDYTLTISSLEPEDFAVYYC
Humanized E6 light chain variable complementarity determining regions 3
(CDR3) sequence:
(DNA)
(SEQ ID NO: 105)
cagcagcgtagcagctcccctttcacc
(amino acids)
(SEQ ID NO: 106)
QQRSSSPFT
Humanized E6 Kappa light chain synthesized by Genescript:
(DNA)
(SEQ ID NO: 107)
gaattctaagcttgggccaccatggaagccccagcgcagcttctcttcctcctgctactctggctcccagataccac
tggagaaattgtgttgacacagtctccagccaccctgtctttgtctccaggggaaagagccaccctcacctgcagcg
ccaccagcagtgttagctacatccactggtaccaacagaggcctggccagagccccaggctcctcatctatagcacc
tccaacctggccagcggcatcccagccaggttcagtggcagtgggtctgggagcgactacactctcaccatcagcag
cctagagcctgaagattttgcagtttattactgtcagcagcgtagcagctcccctttcacctttggcagcggcacca
aagtggaaattaaaaggacggtggctgcaccatctgtcttcatcttcccgccatctgatgagcagttgaaatctgga
actgcctctgttgtgtgcctgctgaataacttctatcccagagaggccaaagtacagtggaaggtggataacgccct
ccaatcgggtaactcccaggagagtgtcacagagcaggacagcaaggacagcacctacagcctcagcagcaccctga
cgctgagcaaagcagactacgagaaacacaaagtctacgcctgcgaagtcacccatcagggcctgagctcgcccgtc
acaaagagcttcaacaggggagagtgttagtaagtttaaactctaga
(amino acids)
(SEQ ID NO: 108)
EF*AWATMEAPAQLLELLLLWLPDTTGEIVLTQSPATLSLSPGERATLTCSATSSVSYIHWYQQRPGQSPRLLIYST
SNLASGIPARFSGSGSGSDYTLTISSLEPEDFAVYYCQQRSSSPFTFGSGTKVEIKRTVAAPSVFIFPPSDEQLKSG
TASVVCLLNNEYPREAKVQWKVDNALQSGNSQESVTEQDSKDSTYSLSSTLTLSKADYEKHKVYACEVTHQGLSSPV
TKSENRGEC**V*TLX
Human Kappa light chain constant region sequence:
(DNA)
(SEQ ID NO: 109)
aggacggtggctgcaccatctgtcttcatcttcccgccatctgatgagcagttgaaatctggaactgcctctgttgt
gtgcctgctgaataacttctatcccagagaggccaaagtacagtggaaggtggataacgccctccaatcgggtaact
cccaggagagtgtcacagagcaggacagcaaggacagcacctacagcctcagcagcaccctgacgctgagcaaagca
gactacgagaaacacaaagtctacgcctgcgaagtcacccatcagggcctgagctcgcccgtcacaaagagcttcaa
caggggagagtgttag
(amino acids)
(SEQ ID NO: 110)
RTVAAPSVFIFPPSDEQLKSGTASVVCLLNNEYPREAKVQWKVDNALQSGNSQESVTEQDSKDSTYSLSSTLTLSKA
DYEKHKVYACEVTHQGLSSPVTKSFNRGEC
Humanized E6 lambda light chain sequence:
(DNA)
(SEQ ID NO: 111)
gaaattgtgttgacacagtctccagccaccctgtctttgtctccaggggaaagagccaccctcacctgcagcgccac
cagcagtgttagctacatccactggtaccaacagaggcctggccagagccccaggctcctcatctatagcacctcca
acctggccagcggcatcccagccaggttcagtggcagtgggtctgggagcgactacactctcaccatcagcagccta
gagcctgaagattttgcagtttattactgtcagcagcgtagcagctcccctttcacctttggcagcggcaccaaagt
ggaaattaaaggtcagcccaaggctgccccctcggtcactctgttcccgccctcctctgaggagcttcaagccaaca
aggccacactggtgtgtctcataagtgacttctacccgggagccgtgacagtggcctggaaggcagatagcagcccc
gtcaaggcgggagtggagaccaccacaccctccaaacaaagcaacaacaagtacgcggccagcagctatctgagcct
gacgcctgagcagtggaagtcccacagaagctacagctgccaggtcacgcatgaagggagcaccgtggagaagacag
tggcccctacagaatgttcatagtaa
(amino acids)
(SEQ ID NO: 112)
EIVLTQSPATLSLSPGERATLTCSATSSVSYIHWYQQRPGQSPRLLIYSTSNLASGIPARFSGSGSGSDYTLTISSL
EPEDFAVYYCQQRSSSPFTEGSGTKVEIKGQPKAAPSVTLEPPSSEELQANKATLVCLISDFYPGAVTVAWKADSSP
VKAGVETTTPSKQSNNKYAASSYLSLTPEQWKSHRSYSCQVTHEGSTVEKTVAPTECS**
Humanized lambda light chain constant region sequence:
(DNA)
(SEQ ID NO: 113)
ggtcagcccaaggctgccccctcggtcactctgttcccgccctcctctgaggagcttcaagccaacaaggccacact
ggtgtgtctcataagtgacttctacccgggagccgtgacagtggcctggaaggcagatagcagccccgtcaaggcgg
gagtggagaccaccacaccctccaaacaaagcaacaacaagtacgcggccagcagctatctgagcctgacgcctgag
cagtggaagtcccacagaagctacagctgccaggtcacgcatgaagggagcaccgtggagaagacagtggcccctac
agaatgttcatagtaa
(amino acids)
(SEQ ID NO: 114)
GQPKAAPSVTLEPPSSEELQANKATLVCLISDFYPGAVTVAWKADSSPVKAGVETTTPSKQSNNKYAASSYLSLTPE
QWKSHRSYSCQVTHEGSTVEKTVAPTECS**
Mouse C2 heavy chain variable region sequence:
(DNA)
(SEQ ID NO: 118)
gaggtccagctggaggagtcagggggaggcttagtgaagcctggagggtccctgaaactctcctgtgcagcctctgg
attcactttcagtggctatgccatgtcttgggttcgccagactccggagaagaggctggagtgggtcgcaaccatta
gtagtggtggtacttatatctactatccagacagtgtgaaggggcgattcaccatctccagagacaatgccaagaac
accctgtacctgcaaatgagcagtctgaggtctgaggacacggccatgtattactgtgcaagacttgggggggataa
ttactacgaatacttcgatgtctggggcgcagggaccacggtcaccgtctcctccgccaaaacgacacccccatctg
tctat
(amino acids)
(SEQ ID NO: 119)
EVQLEESGGGLVKPGGSLKLSCAASGFTFSGYAMSWVRQTPEKRLEWVATISSGGTYIYYPDSVKGRFTISRDNAKN
TLYLQMSSLRSEDTAMYYCARLGGDNYYEYFDVWGAGTTVTVSSAKTTPPSVY
Mouse C2 heavy chain variable framework region 1 (FWR1) sequence:
(DNA)
(SEQ ID NO: 120)
gaggtccagctggaggagtcagggggaggcttagtgaagcctggagggtccctgaaactctcctgtgcagcctctgg
attcactttcagt
(amino acids)
(SEQ ID NO: 121)
EVQLEESGGGLVKPGGSLKLSCAASGFTFS
Mouse C2 heavy chain variable complementarity determining regions 1 (CDR1)
sequence:
(DNA)
(SEQ ID NO: 122)
ggctatgccatgtct
(amino acids)
(SEQ ID NO: 123)
GYAMS
Mouse C2 heavy chain variable framework region 2 (FWR2) sequence:
(DNA)
(SEQ ID NO: 124)
tgggttcgccagactccggagaagaggctggagtgggtcgca
(amino acids)
(SEQ ID NO: 125)
WVRQTPEKRLEWVA
Mouse C2 heavy chain variable complementarity determining regions 2 (CDR2)
sequence:
(DNA)
(SEQ ID NO: 126)
accattagtagtggtggtacttatatctactatccagacagtgtgaagggg
(amino acids)
(SEQ ID NO: 127)
TISSGGTYIYYPDSVKG
Mouse C2 heavy chain variable framework region 3 (FWR3) sequence:
(DNA)
(SEQ ID NO: 128)
cgattcaccatctccagagacaatgccaagaacaccctgtacctgcaaatgagcagtctgaggtctgaggacacggc
catgtattactgtgcaaga
(amino acids)
(SEQ ID NO: 129)
RFTISRDNAKNTLYLQMSSLRSEDTAMYYCAR
Mouse C2 heavy chain variable complementarity determining regions 3 (CDR3)
sequence:
(DNA)
(SEQ ID NO: 130)
cttgggggggataattactacgaatacttcgatgtc
(amino acids)
(SEQ ID NO: 131)
LGGDNYYEYFDV
Humanized derived from IGHV3-21*04:
Humanized C2 heavy chain variable region sequence:
(DNA)
(SEQ ID NO: 144)
gaggtgcagctggtggagtctgggggaggcctggtcaagcctggggggtccctgagactctcctgtgcagcctctgg
attcaccttcagtggctatgccatgagctgggtccgccaggctccagggaaggggctggagtgggtctcaaccatta
gtagtggcggaacctacatatactaccccgactcagtgaagggccgattcaccatctccagagacaacgccaagaac
tcactgtatctgcaaatgaacagcctgagagccgaggacacggccgtgtattactgtgcgagacttgggggggataa
ttactacgaatacttcgatgtctggggcaaagggaccacggtcaccgtctcctcc
(amino acids)
(SEQ ID NO: 145)
EVQLVESGGGLVKPGGSLRLSCAASGFTFSGYAMSWVRQAPGKGLEWVSTISSGGTYIYYPDSVKGRFTISRDNAKN
SLYLQMNSLRAEDTAVYYCARLGGDNYYEYFDVWGKGTTVTVSS
Humanized C2 heavy chain variable framework region 1 (FWR1) sequence:
(DNA)
(SEQ ID NO: 146)
gaggtgcagctggtggagtctgggggaggcctggtcaagcctggggggtccctgagactctcctgtgcagcctctgg
attcaccttcagt
(amino acids)
(SEQ ID NO: 147)
EVQLVESGGGLVKPGGSLRLSCAASGFTFS
Humanized C2 heavy chain variable complementarity determining regions 1 (CDR1)
sequence:
(DNA)
(SEQ ID NO: 148)
ggctatgccatgagc
(amino acids)
(SEQ ID NO: 149)
GYAMS
Humanized C2 heavy chain variable framework region 2 (FWR2) sequence:
(DNA)
(SEQ ID NO: 150)
tgggtccgccaggctccagggaaggggctggagtgggtctcaa
(amino acids)
(SEQ ID NO: 151)
WVRQAPGKGLEWVS
Humanized C2 heavy chain variable complementarity determiningregions 2
(CDR2) sequence:
(DNA)
(SEQ ID NO: 152)
accattagtagtggcggaacctacatatactaccccgactcagtgaagggc
(amino acids)
(SEQ ID NO: 153)
TISSGGTYIYYPDSVKG
Humanized C2 heavy chain variable framework region 3 (FWR3) sequence:
(DNA)
(SEQ ID NO: 154)
cgattcaccatctccagagacaacgccaagaactcactgtatctgcaaatgaacagcctgagagccgaggacacggc
cgtgtattactgtgcgaga
(amino acids)
(SEQ ID NO: 155)
RFTISRDNAKNSLYLQMNSLRAEDTAVYYCAR
Humanized C2 heavy chain variable complementarity determining regions 3
(CDR3) sequence:
(DNA)
(SEQ ID NO: 156)
cttgggggggataattactacgaatacttcgatgtc
(amino acids)
(SEQ ID NO: 157)
LGGDNYYEYFDV
Humanized C2 IgG1 heavy chain sequence
(DNA)
(SEQ ID NO: 157)
gaggtgcagctggtggagtctgggggaggcctggtcaagcctggggggtccctgagactctcctgtgcagcctctgg
attcaccttcagtggctatgccatgagctgggtccgccaggctccagggaaggggctggagtgggtctcaaccatta
gtagtggcggaacctacatatactaccccgactcagtgaagggccgattcaccatctccagagacaacgccaagaac
tcactgtatctgcaaatgaacagcctgagagccgaggacacggccgtgtattactgtgcgagacttgggggggataa
ttactacgaatacttcgatgtctggggcaaagggaccacggtcaccgtctcctccgctagcaccaagggcccatcgg
tcttccccctggcaccctcctccaagagcacctctgggggcacagcggccctgggctgcctggtcaaggactacttc
cccgaaccggtgacggtgtcgtggaactcaggcgccctgaccagcggcgtgcacaccttcccggctgtcctacagtc
ctcaggactctactccctcagcagcgtggtgacagtgccctccagcagcttgggcacccagacctacatctgcaacg
tgaatcacaagcccagcaacaccaaggtggacaagaaagttgagcccaaatcttgtgacaaaactcacacatgccca
ccgtgcccagcacctgaactcctggggggaccgtcagtcttcctcttccccccaaaacccaaggacaccctcatgat
ctcccggacccctgaggtcacatgcgtggtggtggacgtgagccacgaagaccctgaggtcaagttcaactggtacg
tggacggcgtggaggtgcataatgccaagacaaagccgcgggaggagcagtacaacagcacgtaccgtgtggtcagc
gtcctcaccgtcctgcaccaggactggctgaatggcaaggagtacaagtgcaaggtctccaacaaagccctcccagc
ccccatcgagaaaaccatctccaaagccaaagggcagccccgagaaccacaggtgtacaccctgcccccatcccggg
aggagatgaccaagaaccaggtcagcctgacctgcctggtcaaaggcttctatcccagcgacatcgccgtggagtgg
gagagcaatgggcagccggagaacaactacaagaccacgcctcccgtgctggactccgacggctccttcttcctcta
cagcaagctcaccgtggacaagagcaggtggcagcaggggaacgtcttctcatgctccgtgatgcatgaggctctgc
acaaccactacacgcagaagagcctctccctgtctccgggtaaatgataa
(amino acids)
(SEQ ID NO: 158)
EVQLVESGGGLVKPGGSLRLSCAASGFTFSGYAMSWVRQAPGKGLEWVSTISSGGTYIYYPDSVKGRFTISRDNAKN
SLYLQMNSLRAEDTAVYYCARLGGDNYYEYFDVWGKGTTVTVSSASTKGPSVFPLAPSSKSTSGGTAALGCLVKDYF
PEPVTVSWNSGALTSGVHTFPAVLQSSGLYSLSSVVTVPSSSLGTQTYICNVNHKPSNTKVDKKVEPKSCDKTHTCP
PCPAPELLGGPSVFLEPPKPKDTLMISRTPEVTCVVVDVSHEDPEVKFNWYVDGVEVHNAKTKPREEQYNSTYRVVS
VLTVLHQDWLNGKEYKCKVSNKALPAPIEKTISKAKGQPREPQVYTLPPSREEMTKNQVSLTCLVKGFYPSDIAVEW
ESNGQPENNYKTTPPVLDSDGSFFLYSKLTVDKSRWQQGNVESCSVMHEALHNHYTQKSLSLSPGK**
Humanized C2 IgG2 heavy chain sequence
(DNA)
(SEQ ID NO: 163)
gaggtgcagctggtggagtctgggggaggcctggtcaagcctggggggtccctgagactctcctgtgcagcctctgg
attcaccttcagtggctatgccatgagctgggtccgccaggctccagggaaggggctggagtgggtctcaaccatta
gtagtggcggaacctacatatactaccccgactcagtgaagggccgattcaccatctccagagacaacgccaagaac
tcactgtatctgcaaatgaacagcctgagagccgaggacacggccgtgtattactgtgcgagacttgggggggataa
ttactacgaatacttcgatgtctggggcaaagggaccacggtcaccgtctcctccgcctccaccaagggcccatcgg
tcttccccctggcgccctgctccaggagcacctccgagagcacagccgccctgggctgcctggtcaaggactacttc
cccgaaccggtgacggtgtcgtggaactcaggcgctctgaccagcggcgtgcacaccttcccagctgtcctacagtc
ctcaggactctactccctcagcagcgtggtgaccgtgccctccagcaacttcggcacccagacctacacctgcaacg
tagatcacaagcccagcaacaccaaggtggacaagacagttgagcgcaaatgttgtgtcgagtgcccaccgtgccca
gcaccacctgtggcaggaccgtcagtcttcctcttccccccaaaacccaaggacaccctcatgatctcccggacccc
tgaggtcacgtgcgtggtggtggacgtgagccacgaagaccccgaggtccagttcaactggtacgtggacggcgtgg
aggtgcataatgccaagacaaagccacgggaggagcagttcaacagcacgttccgtgtggtcagcgtcctcaccgtt
gtgcaccaggactggctgaacggcaaggagtacaagtgcaaggtctccaacaaaggcctcccagcccccatcgagaa
aaccatctccaaaaccaaagggcagccccgagaaccacaggtgtacaccctgcccccatcccgggaggagatgacca
agaaccaggtcagcctgacctgcctggtcaaaggcttctaccccagcgacatcgccgtggagtgggagagcaatggg
cagccggagaacaactacaagaccacacctcccatgctggactccgacggctccttcttcctctacagcaagctcac
cgtggacaagagcaggtggcagcaggggaacgtcttctcatgctccgtgatgcatgaggctctgcacaaccactaca
cgcagaagagcctctccctgtctccgggtaaatagtaa
(amino acids)
(SEQ ID NO: 164)
EVQLVESGGGLVKPGGSLRLSCAASGFTFSGYAMSWVRQAPGKGLEWVSTISSGGTYIYYPDSVKGRFTISRDNAKN
SLYLQMNSLRAEDTAVYYCARLGGDNYYEYFDVWGKGTTVTVSSASTKGPSVFPLAPCSRSTSESTAALGCLVKDYF
PEPVTVSWNSGALTSGVHTFPAVLQSSGLYSLSSVVTVPSSNEGTQTYTCNVDHKPSNTKVDKTVERKCCVECPPCP
APPVAGPSVFLEPPKPKDTLMISRTPEVTCVVVDVSHEDPEVQFNWYVDGVEVHNAKTKPREEQFNSTERVVSVLTV
VHQDWLNGKEYKCKVSNKGLPAPIEKTISKTKGQPREPQVYTLPPSREEMTKNQVSLTCLVKGFYPSDIAVEWESNG
QPENNYKTTPPMLDSDGSFFLYSKLTVDKSRWQQGNVESCSVMHEALHNHYTQKSLSLSPGK**
Mouse C2 light chain variable region sequence:
(DNA)
(SEQ ID NO: 168)
gacattgtgatcacacagtctacagcttccttaggtgtatctctggggcagagggccaccatctcatgcagggccag
caaaagtgtcagtacatctggctatagttatatgcactggtaccaacagagaccaggacagccacccaaactcctca
tctatcttgcatccaacctagaatctggggtccctgccaggttcagtggcagtgggtctgggacagacttcaccctc
aacatccatcctgtggaggaggaggatgctgcaacctattactgtcagcacagtagggagcttccgttcacgttcgg
aggggggaccaagctggagataaaacgggctgatgctgcaccaactgtatcc
(amino acids)
(SEQ ID NO: 169)
DIVITQSTASLGVSLGQRATISCRASKSVSTSGYSYMHWYQQRPGQPPKLLIYLASNLESGVPARFSGSGSGTDFTL
NIHPVEEEDAATYYCQHSRELPFTFGGGTKLEIKRADAAPTVS
Mouse C2 light chain variable framework region 1 (FWR1) sequence:
(DNA)
(SEQ ID NO: 170)
gacattgtgatcacacagtctacagcttccttaggtgtatctctggggcagagggccaccatctcatgc
(amino acids)
(SEQ ID NO: 171)
DIVITQSTASLGVSLGQRATISC
Mouse C2 light chain variable complementarity determining regions 1 (CDR1)
sequence:
(DNA)
(SEQ ID NO: 172)
agggccagcaaaagtgtcagtacatctggctatagttatatgcac
(amino acids)
(SEQ ID NO: 173)
RASKSVSTSGYSYMH
Mouse C2 light chain variable framework region 2 (FWR2) sequence:
(DNA)
(SEQ ID NO: 174)
tggtaccaacagagaccaggacagccacccaaactcctcatctat
(amino acids)
(SEQ ID NO: 175)
WYQQRPGQPPKLLIY
Mouse C2 light chain variable complementarity determining regions 2 (CDR2)
sequence:
(DNA)
(SEQ ID NO: 176)
cttgcatccaacctagaatc
(amino acids)
(SEQ ID NO: 177)
LASNLES
Mouse C2 light chain variable framework region 3 (FWR3) sequence:
(DNA)
(SEQ ID NO: 178)
tggggtccctgccaggttcagtggcagtgggtctgggacagacttcaccctcaacatccatcctgtggaggaggagg
atgctgcaacctattactgt
(amino acids)
(SEQ ID NO: 179)
GVPARFSGSGSGTDFTLNIHPVEEEDAATYYC
Mouse C2 light chain variable complementarity determining regions 3 (CDR3)
sequence:
(DNA)
(SEQ ID NO: 180)
cagcacagtagggagcttccgttcacg
(amino acids)
(SEQ ID NO: 181)
QHSRELPFT
Humanized derived from IGKV7-3*01
Humanized C2 light chain variable region sequence:
(DNA)
(SEQ ID NO: 194)
gacattgtgctgacccagtctccagcctccttggccgtgtctccaggacagagggccaccatcacctgcagagccag
taagagtgtcagtaccagcggatactcctacatgcactggtatcagcagaaaccaggacaacctcctaaactcctga
tttacctggcatccaatctggagagcggggtcccagccaggttcagcggcagtgggtctgggaccgatttcaccctc
acaattaatcctgtggaagctaatgatactgcaaattattactgtcagcacagtagggagctgcctttcacattcgg
cggagggaccaaggtggagatcaaacgaact
(amino acids)
(SEQ ID NO: 195)
DIVLTQSPASLAVSPGQRATITCRASKSVSTSGYSYMHWYQQKPGQPPKLLIYLASNLESGVPARFSGSGSGTDFTL
TINPVEANDTANYYCQHSRELPFTFGGGTKVEIKRT
Humanized C2 light chain variable framework region 1 (FWR1) acid sequence:
(DNA)
(SEQ ID NO: 196)
gacattgtgctgacccagtctccagcctccttggccgtgtctccaggacagagggccaccatcacctgc
(amino acids)
(SEQ ID NO: 197)
DIVLTQSPASLAVSPGQRATITC
Humanized C2 light chain variable complementarity determining regions 1 (CDR1)
sequence:
(DNA)
(SEQ ID NO: 198)
agagccagtaagagtgtcagtaccagcggatactcctacatgcac
(amino acids)
(SEQ ID NO: 199)
RASKSVSTSGYSYMH
Humanized C2 heavy light variable framework region 2 (FWR2) acid sequence:
(DNA)
(SEQ ID NO: 200)
tggtatcagcagaaaccaggacaacctcctaaactcctgatttac
(amino acids)
(SEQ ID NO: 201)
WYQQKPGQPPKLLIY
Humanized C2 light chain variable complementarity determining regions 2
(CDR2) sequence:
(DNA)
(SEQ ID NO: 202)
ctggcatccaatctggagagc
(amino acids)
(SEQ ID NO: 203)
LASNLES
Humanized C2 light chain variable framework region 3 (FWR3) acid sequence:
(DNA)
(SEQ ID NO: 204)
ggggtcccagccaggttcagcggcagtgggtctgggaccgatttcaccctcacaattaatcctgtggaagctaatga
tactgcaaattattactgt
(amino acids)
(SEQ ID NO: 205)
GVPARFSGSGSGTDFTLTINPVEANDTANYYC
Humanized C2 light chain variable complementarity determining regions 3
(CDR3) sequence:
(DNA)
(SEQ ID NO: 206)
cagcacagtagggagctgcctttcaca
(amino acids)
(SEQ ID NO: 207)
QHSRELPFT
Humanized C2 light chain variable complementarity determining regions 3
(CDR3) sequence:
(DNA)
(SEQ ID NO: 208)
ctgcagagtaagaattttcctcccaca
(amino acids)
(SEQ ID NO: 209)
LQSKNFPPT
Murine Ig kappa chain leader sequence
(DNA)
(SEQ ID NO: 222)
atggagacagacacactcctgctatgggtactgctgctctgggttccaggttccactggtgac
(amino acids)
(SEQ ID NO: 223)
METDTLLLWVLLLWVPGSTGD
Interleukin-2 (IL-2) leader sequence
(DNA)
(SEQ ID NO: 224)
atgtacaggatgcaactcctgtcttgcattgcactaagtcttgcacttgtcacaaacagt
(amino acids)
(SEQ ID NO: 225)
MYRMQLLSCIALSLALVTNS
CD33 leader sequence
(DNA)
(SEQ ID NO: 226)
atgcctcttctgcttctgcttcctctgctttgggctggagctcttgct
(amino acids)
(SEQ ID NO: 227)
MPLLLLLPLLWAGALA
IGHV3-21*03 leader sequence
(DNA)
(SEQ ID NO: 228)
atggaactggggctccgctgggttttccttgttgctattttagaaggtgtccagtgt
(amino acids)
(SEQ ID NO: 229)
MELGLRWVFLVAILEGVQC
IGHV3-11*02 leader sequence
(DNA)
(SEQ ID NO: 230)
atggaagccccagcgcagcttctcttcctcctgctactctggctcccagataccactgga
(amino acids)
(SEQ ID NO: 231)
MEAPAQLLFLLLLWLPDTTG
Humanized E6 single chain GS3
(DNA)
(SEQ ID NO: 232)
gaggtgcagctggtggagtctgggggaggcctggtcaagcctggggggtccctgagactctcctgtgcagcctctgg
attcaccttcagtaggtatggcatgagctgggtccgccaggctccagggaagaggctggagtgggtctcaaccatta
gtggcggaggcacctacatatactacccagactcagtgaagggccgattcaccatctccagagacaacgccaagaac
accctgtatctgcaaatgaacagcctgagagccgaggacacggctgtgtattactgtaccagagataactatggccg
caactatgattatggcatggattattggggccagggcaccctggtgaccgtgagcagcggcggtggcggatccggcg
gtggcggatccggcggtggcggatccgaaattgtgttgacacagtctccagccaccctgtctttgtctccaggggaa
agagccaccctcacctgcagcgccaccagcagtgttagctacatccactggtaccaacagaggcctggccagagccc
caggctcctcatctatagcacctccaacctggccagcggcatcccagccaggttcagtggcagtgggtctgggagcg
actacactctcaccatcagcagcctagagcctgaagattttgcagtttattactgtcagcagcgtagcagctcccct
ttcacctttggcagcggcaccaaagtggaaattaaa
(amino acids)
(SEQ ID NO: 233)
EVQLVESGGGLVKPGGSLRLSCAASGFTFSRYGMSWVRQAPGKRLEWVSTISGGGTYIYYPDSVKGRFTISRDNAKN
TLYLQMNSLRAEDTAVYYCTRDNYGRNYDYGMDYWGQGTLVTVSSGGGGSGGGGSGGGGSEIVLTQSPATLSLSPGE
RATLTCSATSSVSYIHWYQQRPGQSPRLLIYSTSNLASGIPARFSGSGSGSDYTLTISSLEPEDFAVYYCQQRSSSP
FTFGSGTKVEIK
Humanized E6 single chain IgGlnoC
(DNA)
(SEQ ID NO: 234)
gaggtgcagctggtggagtctgggggaggcctggtcaagcctggggggtccctgagactctcctgtgcagcctctgg
attcaccttcagtaggtatggcatgagctgggtccgccaggctccagggaagaggctggagtgggtctcaaccatta
gtggcggaggcacctacatatactacccagactcagtgaagggccgattcaccatctccagagacaacgccaagaac
accctgtatctgcaaatgaacagcctgagagccgaggacacggctgtgtattactgtaccagagataactatggccg
caactatgattatggcatggattattggggccagggcaccctggtgaccgtgagcagcgataaaacccatactaaac
cgccaaaaccggcgccggaactgctgggtggtcctggtaccggtgaaattgtgttgacacagtctccagccaccctg
tctttgtctccaggggaaagagccaccctcacctgcagcgccaccagcagtgttagctacatccactggtaccaaca
gaggcctggccagagccccaggctcctcatctatagcacctccaacctggccagcggcatcccagccaggttcagtg
gcagtgggtctgggagcgactacactctcaccatcagcagcctagagcctgaagattttgcagtttattactgtcag
cagcgtagcagctcccctttcacctttggcagcggcaccaaagtggaaattaaa
(amino acids)
(SEQ ID NO: 235)
EVQLVESGGGLVKPGGSLRLSCAASGFTFSRYGMSWVRQAPGKRLEWVSTISGGGTYIYYPDSVKGRFTISRDNAKN
TLYLQMNSLRAEDTAVYYCTRDNYGRNYDYGMDYWGQGTLVTVSSDKTHTKPPKPAPELLGGPGTGEIVLTQSPATL
SLSPGERATLTCSATSSVSYIHWYQQRPGQSPRLLIYSTSNLASGIPARFSGSGSGSDYTLTISSLEPEDFAVYYCQ
QRSSSPFTFGSGTKVEIK
Humanized E6 single chain X4 (linker is IgG1 and IgG2 modified hinge region)
(DNA)
(SEQ ID NO: 236)
gaggtgcagctggtggagtctgggggaggcctggtcaagcctggggggtccctgagactctcctgtgcagcctctgg
attcaccttcagtaggtatggcatgagctgggtccgccaggctccagggaagaggctggagtgggtctcaaccatta
gtggcggaggcacctacatatactacccagactcagtgaagggccgattcaccatctccagagacaacgccaagaac
accctgtatctgcaaatgaacagcctgagagccgaggacacggctgtgtattactgtaccagagataactatggccg
caactatgattatggcatggattattggggccagggcaccctggtgaccgtgagcagcgataaaacccatactaaac
cgccaaaaccggcgccggaactgctgggtggtcctggtaccggtactggtggtccgactattaaacctccgaaacct
ccgaaacctgctccgaacctgctgggtggtccggaaattgtgttgacacagtctccagccaccctgtctttgtctcc
aggggaaagagccaccctcacctgcagcgccaccagcagtgttagctacatccactggtaccaacagaggcctggcc
agagccccaggctcctcatctatagcacctccaacctggccagcggcatcccagccaggttcagtggcagtgggtct
gggagcgactacactctcaccatcagcagcctagagcctgaagattttgcagtttattactgtcagcagcgtagcag
ctcccctttcacctttggcagcggcaccaaagtggaaattaaa
(amino acids)
(SEQ ID NO: 237)
EVQLVESGGGLVKPGGSLRLSCAASGFTFSRYGMSWVRQAPGKRLEWVSTISGGGTYIYYPDSVKGRFTISRDNAKN
TLYLQMNSLRAEDTAVYYCTRDNYGRNYDYGMDYWGQGTLVTVSSDKTHTKPPKPAPELLGGPGTGTGGPTIKPPKP
PKPAPNLLGGPEIVLTQSPATLSLSPGERATLTCSATSSVSYIHWYQQRPGQSPRLLIYSTSNLASGIPARFSGSGS
GSDYTLTISSLEPEDFAVYYCQQRSSSPFTFGSGTKVEIK
Humanized C2 single chain GS3
(DNA)
(SEQ ID NO: 238)
gaggtgcagctggtggagtctgggggaggcctggtcaagcctggggggtccctgagactctcctgtgcagcctctgg
attcaccttcagtggctatgccatgagctgggtccgccaggctccagggaaggggctggagtgggtctcaaccatta
gtagtggcggaacctacatatactaccccgactcagtgaagggccgattcaccatctccagagacaacgccaagaac
tcactgtatctgcaaatgaacagcctgagagccgaggacacggccgtgtattactgtgcgagacttgggggggataa
ttactacgaatacttcgatgtctggggcaaagggaccacggtcaccgtctcctccggcggtggcggatccggcggtg
gcggatccggcggtggcggatccgacattgtgctgacccagtctccagcctccttggccgtgtctccaggacagagg
gccaccatcacctgcagagccagtaagagtgtcagtaccagcggatactcctacatgcactggtatcagcagaaacc
aggacaacctcctaaactcctgatttacctggcatccaatctggagagcggggtcccagccaggttcagcggcagtg
ggtctgggaccgatttcaccctcacaattaatcctgtggaagctaatgatactgcaaattattactgtcagcacagt
agggagctgcctttcacattcggcggagggaccaaggtggagatcaaacgaact
(amino acids)
(SEQ ID NO: 239)
EVQLVESGGGLVKPGGSLRLSCAASGFTFSGYAMSWVRQAPGKGLEWVSTISSGGTYIYYPDSVKGRFTISRDNAKN
SLYLQMNSLRAEDTAVYYCARLGGDNYYEYFDVWGKGTTVTVSSGGGGSGGGGSGGGGSDIVLTQSPASLAVSPGQR
ATITCRASKSVSTSGYSYMHWYQQKPGQPPKLLIYLASNLESGVPARFSGSGSGTDFTLTINPVEANDTANYYCQHS
RELPFTFGGGTKVEIKRT
Humanized C2 single chain X4 (linker is IgG1 and IgG2 modified hinge region)
(DNA)
(SEQ ID NO: 242)
gaggtgcagctggtggagtctgggggaggcctggtcaagcctggggggtccctgagactctcctgtgcagcctctgg
attcaccttcagtggctatgccatgagctgggtccgccaggctccagggaaggggctggagtgggtctcaaccatta
gtagtggcggaacctacatatactaccccgactcagtgaagggccgattcaccatctccagagacaacgccaagaac
tcactgtatctgcaaatgaacagcctgagagccgaggacacggccgtgtattactgtgcgagacttgggggggataa
ttactacgaatacttcgatgtctggggcaaagggaccacggtcaccgtctcctccgataaaacccatactaaaccgc
caaaaccggcgccggaactgctgggtggtcctggtaccggtactggtggtccgactattaaacctccgaaacctccg
aaacctgctccgaacctgctgggtggtccggacattgtgctgacccagtctccagcctccttggccgtgtctccagg
acagagggccaccatcacctgcagagccagtaagagtgtcagtaccagcggatactcctacatgcactggtatcagc
agaaaccaggacaacctcctaaactcctgatttacctggcatccaatctggagagcggggtcccagccaggttcagc
ggcagtgggtctgggaccgatttcaccctcacaattaatcctgtggaagctaatgatactgcaaattattactgtca
gcacagtagggagctgcctttcacattcggcggagggaccaaggtggagatcaaacgaact
(amino acids)
(SEQ ID NO: 243)
EVQLVESGGGLVKPGGSLRLSCAASGFTFSGYAMSWVRQAPGKGLEWVSTISSGGTYIYYPDSVKGRFTISRDNAKN
SLYLQMNSLRAEDTAVYYCARLGGDNYYEYEDVWGKGTTVTVSSDKTHTKPPKPAPELLGGPGTGTGGPTIKPPKPP
KPAPNLLGGPDIVLTQSPASLAVSPGQRATITCRASKSVSTSGYSYMHWYQQKPGQPPKLLIYLASNLESGVPARFS
GSGSGTDFTLTINPVEANDTANYYCQHSRELPFTEGGGTKVEIKRT
Humanized C3 single chain GS3
(DNA)
(SEQ ID NO: 244)
caggttcagctggtgcagtctggagctgaggtgaagaagcctggggcctcagtgaaggtctcctgcaaggcttctgg
ttacacctttaccgactacgccatgaactgggtgcgacaggcccctggacaagggcttgagtggatgggagtgatca
gcaccttcagcggtaacacaaacttcaaccagaagttcaagggcagagtcaccatgaccacagacacatccacgagc
acagcctacatggagctgaggagcctgagatctgacgacacggccgtgtattactgtgcgagaagcgactactacgg
cccatacttcgactactggggccagggcaccaccctgaccgtgtccagcggcggtggcggatccggcggtggcggat
ccggcggtggcggatccgatattgtgatgacccagactccactctctctgtccgtcacccctggacagccggcctcc
atctcctgcaggtctagtcagaccattgtccatagtaatggaaacacctatttggagtggtacctgcagaagccagg
ccagtctccacagctcctgatctataaggtttccaaccggttctctggagtgccagataggttcagtggcagcgggt
cagggacagatttcacactgaaaatcagccgggtggaggctgaggatgttggggtttattactgcttccaaggtagc
cacgtgcctttcaccttcggcggagggaccaaggtggagatcaaacgaact
(amino acids)
(SEQ ID NO: 245)
QVQLVQSGAEVKKPGASVKVSCKASGYTFTDYAMNWVRQAPGQGLEWMGVISTFSGNTNFNQKFKGRVTMTTDTSTS
TAYMELRSLRSDDTAVYYCARSDYYGPYFDYWGQGTTLTVSSGGGGSGGGGSGGGGSDIVMTQTPLSLSVTPGQPAS
ISCRSSQTIVHSNGNTYLEWYLQKPGQSPQLLIYKVSNRFSGVPDRFSGSGSGTDFTLKISRVEAEDVGVYYCFQGS
HVPFTFGGGTKVEIKRT
Humanized C3 single chain X4 (linker is IgG1 and IgG2 modified hinge region)
(DNA)
(SEQ ID NO: 248)
caggttcagctggtgcagtctggagctgaggtgaagaagcctggggcctcagtgaaggtctcctgcaaggcttctgg
ttacacctttaccgactacgccatgaactgggtgcgacaggcccctggacaagggcttgagtggatgggagtgatca
gcaccttcagcggtaacacaaacttcaaccagaagttcaagggcagagtcaccatgaccacagacacatccacgagc
acagcctacatggagctgaggagcctgagatctgacgacacggccgtgtattactgtgcgagaagcgactactacgg
cccatacttcgactactggggccagggcaccaccctgaccgtgtccagcgataaaacccatactaaaccgccaaaac
cggcgccggaactgctgggtggtcctggtaccggtactggtggtccgactattaaacctccgaaacctccgaaacct
gctccgaacctgctgggtggtccggatattgtgatgacccagactccactctctctgtccgtcacccctggacagcc
ggcctccatctcctgcaggtctagtcagaccattgtccatagtaatggaaacacctatttggagtggtacctgcaga
agccaggccagtctccacagctcctgatctataaggtttccaaccggttctctggagtgccagataggttcagtggc
agcgggtcagggacagatttcacactgaaaatcagccgggtggaggctgaggatgttggggtttattactgcttcca
aggtagccacgtgcctttcaccttcggcggagggaccaaggtggagatcaaacgaact
(amino acids)
(SEQ ID NO: 249)
QVQLVQSGAEVKKPGASVKVSCKASGYTFTDYAMNWVRQAPGQGLEWMGVISTFSGNTNFNQKFKGRVTMTTDTSTS
TAYMELRSLRSDDTAVYYCARSDYYGPYFDYWGQGTTLTVSSDKTHTKPPKPAPELLGGPGTGTGGPTIKPPKPPKP
APNLLGGPDIVMTQTPLSLSVTPGQPASISCRSSQTIVHSNGNTYLEWYLQKPGQSPQLLIYKVSNRFSGVPDRFSG
SGSGTDFTLKISRVEAEDVGVYYCFQGSHVPFTEGGGTKVEIKRT
Humanized C8 single chain GS3 (linker is [Gly4Seri]3)
(DNA)
(SEQ ID NO: 250)
gaggtgcagctggtggagtctgggggaggcctggtcaagcctggggggtccctgagactctcctgtgcagcctctgg
attcaccttcagtggctatgccatgagctgggtccgccaggctccagggaaggggctggagtgggtctcaaccatta
gtagtggcggaacctacatatactaccctgactcagtgaagggccgattcaccatctccagagacaacgccaagaac
tcactgtatctgcaaatgaacagcctgagagccgaggacacggccgtgtattactgtgcgagactgggcggcgataa
ctattatgaatattggggcaaagggaccacggtcaccgtctcctccggcggtggcggatccggcggtggcggatccg
gcggtggcggatccgacatcgtgatgacccagtctccagactccctggctgtgtctctgggcgagagggccaccatc
aactgcagggccagcaagagtgttagcaccagcggctacagctacatgcactggtaccagcagaaaccaggacagcc
tcctaagctgctcatttacctggtgtctaacctggaatccggggtccctgaccgattcagtggcagcgggtctggga
cagatttcactctcaccatcagcagcctgcaggctgaagatgtggcagtttattactgtcaacacattcgggaactg
accaggagtgaattcggcggagggaccaaggtggagatcaaacgaact
(amino acids)
(SEQ ID NO: 251)
EVQLVESGGGLVKPGGSLRLSCAASGFTFSGYAMSWVRQAPGKGLEWVSTISSGGTYIYYPDSVKGRFTISRDNAKN
SLYLQMNSLRAEDTAVYYCARLGGDNYYEYWGKGTTVTVSSGGGGSGGGGSGGGGSDIVMTQSPDSLAVSLGERATI
NCRASKSVSTSGYSYMHWYQQKPGQPPKLLIYLVSNLESGVPDRFSGSGSGTDFTLTISSLQAEDVAVYYCQHIREL
TRSEFGGGTKVEIKRT
pSECTag2 E6 scFV-FC
(DNA)
(SEQ ID NO: 256)
atggagacagacacactcctgctatgggtactgctgctctgggttccaggttccactggtgacgcggcccagccggc
cgaggtgcagctggtggagtctgggggaggcctggtcaagcctggggggtccctgagactctcctgtgcagcctctg
gattcaccttcagtaggtatggcatgagctgggtccgccaggctccagggaagaggctggagtgggtctcaaccatt
agtggcggaggcacctacatatactacccagactcagtgaagggccgattcaccatctccagagacaacgccaagaa
caccctgtatctgcaaatgaacagcctgagagccgaggacacggctgtgtattactgtaccagagataactatggcc
gcaactatgattatggcatggattattggggccagggcaccctggtgaccgtgagcagcggcggtggcggatccggc
ggtggcggatccggcggtggcggatccgaaattgtgttgacacagtctccagccaccctgtctttgtctccagggga
aagagccaccctcacctgcagcgccaccagcagtgttagctacatccactggtaccaacagaggcctggccagagcc
ccaggctcctcatctatagcacctccaacctggccagcggcatcccagccaggttcagtggcagtgggtctgggagc
gactacactctcaccatcagcagcctagagcctgaagattttgcagtttattactgtcagcagcgtagcagctcccc
tttcacctttggcagcggcaccaaagtggaaattaaagagcccaaatcttgtgacaaaactcacacatgcccaccgt
gcccagcacctgaactcctggggggaccgtcagtcttcctcttccccccaaaacccaaggacaccctcatgatctcc
cggacccctgaggtcacatgcgtggtggtggacgtgagccacgaagaccctgaggtcaagttcaactggtacgtgga
cggcgtggaggtgcataatgccaagacaaagccgcgggaggagcagtacaacagcacgtaccgtgtggtcagcgtcc
tcaccgtcctgcaccaggactggctgaatggcaaggagtacaagtgcaaggtctccaacaaagccctcccagccccc
atcgagaaaaccatctccaaagccaaagggcagccccgagaaccacaggtgtacaccctgcccccatcccgggagga
gatgaccaagaaccaggtcagcctgacctgcctggtcaaaggcttctatcccagcgacatcgccgtggagtgggaga
gcaatgggcagccggagaacaactacaagaccacgcctcccgtgctggactccgacggctccttcttcctctacagc
aagctcaccgtggacaagagcaggtggcagcaggggaacgtcttctcatgctccgtgatgcatgaggctctgcacaa
ccactacacgcagaagagcctctccctgtctccgggtaaatgataa
(amino acids)
(SEQ ID NO: 257)
METDTLLLWVLLLWVPGSTGDAAQPAEVQLVESGGGLVKPGGSLRLSCAASGFTFSRYGMSWVRQAPGKRLEWVSTI
SGGGTYIYYPDSVKGRFTISRDNAKNTLYLQMNSLRAEDTAVYYCTRDNYGRNYDYGMDYWGQGTLVTVSSGGGGSG
GGGSGGGGSEIVLTQSPATLSLSPGERATLTCSATSSVSYIHWYQQRPGQSPRLLIYSTSNLASGIPARFSGSGSGS
DYTLTISSLEPEDFAVYYCQQRSSSPFTEGSGTKVEIKEPKSCDKTHTCPPCPAPELLGGPSVFLEPPKPKDTLMIS
RTPEVTCVVVDVSHEDPEVKFNWYVDGVEVHNAKTKPREEQYNSTYRVVSVLTVLHQDWLNGKEYKCKVSNKALPAP
IEKTISKAKGQPREPQVYTLPPSREEMTKNQVSLTCLVKGFYPSDIAVEWESNGQPENNYKTTPPVLDSDGSFFLYS
KLTVDKSRWQQGNVFSCSVMHEALHNHYTQKSLSLSPGK**
Human IgG1 Fc sequence:
(DNA)
(SEQ ID NO: 272)
gagcccaaatcttgtgacaaaactcacacatgcccaccgtgcccagcacctgaactcctggggggaccgtcagtctt
cctcttccccccaaaacccaaggacaccctcatgatctcccggacccctgaggtcacatgcgtggtggtggacgtga
gccacgaagaccctgaggtcaagttcaactggtacgtggacggcgtggaggtgcataatgccaagacaaagccgcgg
gaggagcagtacaacagcacgtaccgtgtggtcagcgtcctcaccgtcctgcaccaggactggctgaatggcaagga
gtacaagtgcaaggtctccaacaaagccctcccagcccccatcgagaaaaccatctccaaagccaaagggcagcccc
gagaaccacaggtgtacaccctgcccccatcccgggaggagatgaccaagaaccaggtcagcctgacctgcctggtc
aaaggcttctatcccagcgacatcgccgtggagtgggagagcaatgggcagccggagaacaactacaagaccacgcc
tcccgtgctggactccgacggctccttcttcctctacagcaagctcaccgtggacaagagcaggtggcagcagggga
acgtcttctcatgctccgtgatgcatgaggctctgcacaaccactacacgcagaagagcctctccctgtctccgggt
aaatgataa
(amino acids)
(SEQ ID NO: 273)
EPKSCDKTHTCPPCPAPELLGGPSVFLFPPKPKDTLMISRTPEVTCVVVDVSHEDPEVKFNWYVDGVEVHNAKTKPR
EEQYNSTYRVVSVLTVLHQDWLNGKEYKCKVSNKALPAPIEKTISKAKGQPREPQVYTLPPSREEMTKNQVSLTCLV
KGFYPSDIAVEWESNGQPENNYKTTPPVLDSDGSFFLYSKLTVDKSRWQQGNVFSCSVMHEALHNHYTQKSLSLSPG
K**
Human IgG1 CH2—CH3 domain sequence:
(DNA)
(SEQ ID NO: 274)
ccgtgcccagcacctgaactcctggggggaccgtcagtcttcctcttccccccaaaacccaaggacaccctcatgat
ctcccggacccctgaggtcacatgcgtggtggtggacgtgagccacgaagaccctgaggtcaagttcaactggtacg
tggacggcgtggaggtgcataatgccaagacaaagccgcgggaggagcagtacaacagcacgtaccgtgtggtcagc
gtcctcaccgtcctgcaccaggactggctgaatggcaaggagtacaagtgcaaggtctccaacaaagccctcccagc
ccccatcgagaaaaccatctccaaagccaaagggcagccccgagaaccacaggtgtacaccctgcccccatcccggg
aggagatgaccaagaaccaggtcagcctgacctgcctggtcaaaggcttctatcccagcgacatcgccgtggagtgg
gagagcaatgggcagccggagaacaactacaagaccacgcctcccgtgctggactccgacggctccttcttcctcta
cagcaagctcaccgtggacaagagcaggtggcagcaggggaacgtcttctcatgctccgtgatgcatgaggctctgc
acaaccactacacgcagaagagcctctccctgtctccgggtaaatgataa
(amino acids)
(SEQ ID NO: 275)
PCPAPELLGGPSVFLFPPKPKDTLMISRTPEVTCVVVDVSHEDPEVKFNWYVDGVEVHNAKTKPREEQYNSTYRVVS
VLTVLHQDWLNGKEYKCKVSNKALPAPIEKTISKAKGQPREPQVYTLPPSREEMTKNQVSLTCLVKGFYPSDIAVEW
ESNGQPENNYKTTPPVLDSDGSFFLYSKLTVDKSRWQQGNVFSCSVMHEALHNHYTQKSLSLSPGK**
Human IgG1 CH3 domain sequence:
(DNA)
(SEQ ID NO: 276)
gggcagccccgagaaccacaggtgtacaccctgcccccatcccgggaggagatgaccaagaaccaggtcagcctgac
ctgcctggtcaaaggcttctatcccagcgacatcgccgtggagtgggagagcaatgggcagccggagaacaactaca
agaccacgcctcccgtgctggactccgacggctccttcttcctctacagcaagctcaccgtggacaagagcaggtgg
cagcaggggaacgtcttctcatgctccgtgatgcatgaggctctgcacaaccactacacgcagaagagcctctccct
gtctccgggtaaatgataa
(amino acids)
(SEQ ID NO: 277)
GQPREPQVYTLPPSREEMTKNQVSLTCLVKGFYPSDIAVEWESNGQPENNYKTTPPVLDSDGSFFLYSKLTVDKSRW
QQGNVFSCSVMHEALHNHYTQKSLSLSPGK**
CAR-T E6 CD8/CD8/CD28/CD3z sequence:
N-CD81s-huMNE6scFv-CD8ecd fragment- CDB transmembrane- CD28- CD3zeta-C
(DNA)
(SEQ ID NO: 297)
atggccctgcccgtgaccgctttgctgctccccctggcgctgctgctgcacgccgccaggccagaggtccagctggt
tgagagtggcggtgggctggttaagcctggcggctccctgcggctgagctgcgccgcgagtggatttactttcagcc
gatatgggatgagttgggtgcggcaagctcccgggaagaggctggaatgggtctcaacaatctccggggggggcact
tacatctattaccccgactcagtcaaggggagatttaccatttcacgagacaacgctaagaataccctgtatttgca
gatgaattctctgagagcagaggacacagctgtttactattgtacccgcgacaactatggcaggaactacgactacg
gtatggactattggggacaagggacattggttacagtgagcagtggcggcgggggcagcggaggaggaggcagcggt
ggggggggcagcgagatagtgctcacgcagtcacccgcgactctcagtctctcacctggggaacgagctaccctgac
gtgctctgctacctcctcagtgtcatatattcactggtatcagcaacggcccgggcagtcccctagattgctcattt
atagtacctctaatctggcctcaggtatccctgcacgattttctggatctggttcaggttctgattacaccctcact
atctctagcctggagcctgaagactttgccgtttattactgccagcagaggtctagctccccattcacctttgggag
tgggaccaaggttgaaattaaaacgacaaccccggcccccagaccaccaacgccagcccccaccatcgccagccaac
ccctgtctctgagaccagaagcctgtaggcctgccgccggtggagctgtgcacacaagaggactggatttcgcctgt
gatatctacatttgggccccgctcgcaggcacatgtggagtgctcctcctctccctggtgattaccctgtactgcag
aagcaagcggtctcggctcctgcattctgattacatgaacatgaccccaagaagaccaggccccaccaggaaacatt
accagccctacgctccgccacgcgacttcgctgcctaccggtcccgcgttaagttctcccgatcagccgacgcgcct
gcttacaagcagggccagaaccaactgtacaacgagctgaatctcggtagacgggaagagtacgacgtgttggacaa
acggagaggccgcgacccagaaatgggcggcaagcctcgcaggaaaaacccccaggagggactgtacaatgagttgc
agaaagataagatggcagaagcttatagcgagatcggaatgaagggggaaaggagacgagggaaaggacacgacggc
ctttatcagggcctgtccacagcaacaaaagatacgtatgacgccctccatatgcaggcacttccaccacggtgata
a
(amino acids)
(SEQ ID NO: 298)
MALPVTALLLPLALLLHAARPEVQLVESGGGLVKPGGSLRLSCAASGFTESRYGMSWVRQAPGKRLEWVSTISGGGT
YIYYPDSVKGRFTISRDNAKNTLYLQMNSLRAEDTAVYYCTRDNYGRNYDYGMDYWGQGTLVTVSSGGGGSGGGGSG
GGGSEIVLTQSPATLSLSPGERATLTCSATSSVSYIHWYQQRPGQSPRLLIYSTSNLASGIPARFSGSGSGSDYTLT
ISSLEPEDFAVYYCQQRSSSPFTEGSGTKVEIKTTTPAPRPPTPAPTIASQPLSLRPEACRPAAGGAVHTRGLDFAC
DIYIWAPLAGTCGVLLLSLVITLYCRSKRSRLLHSDYMNMTPRRPGPTRKHYQPYAPPRDFAAYRSRVKFSRSADAP
AYKQGQNQLYNELNLGRREEYDVLDKRRGRDPEMGGKPRRKNPQEGLYNELQKDKMAEAYSEIGMKGERRRGKGHDG
LYQGLSTATKDTYDALHMQALPPR**
CAR-T E6 CD8/CD8/4-1BB/CD3z sequence:
N-CD81s-huMNE6scFv-CD8ecd fragment- CDB transmembrane- 4-1BB- CD3zeta-C
(DNA)
(SEQ ID NO: 300)
atggccctgcccgtgaccgctttgctgctccccctggcgctgctgctgcacgccgccaggccagaggtccagctggt
tgagagtggcggtgggctggttaagcctggcggctccctgcggctgagctgcgccgcgagtggatttactttcagcc
gatatgggatgagttgggtgcggcaagctcccgggaagaggctggaatgggtctcaacaatctccggggggggcact
tacatctattaccccgactcagtcaaggggagatttaccatttcacgagacaacgctaagaataccctgtatttgca
gatgaattctctgagagcagaggacacagctgtttactattgtacccgcgacaactatggcaggaactacgactacg
gtatggactattggggacaagggacattggttacagtgagcagtggcggcgggggcagcggaggaggaggcagcggt
ggggggggcagcgagatagtgctcacgcagtcacccgcgactctcagtctctcacctggggaacgagctaccctgac
gtgctctgctacctcctcagtgtcatatattcactggtatcagcaacggcccgggcagtcccctagattgctcattt
atagtacctctaatctggcctcaggtatccctgcacgattttctggatctggttcaggttctgattacaccctcact
atctctagcctggagcctgaagactttgccgtttattactgccagcagaggtctagctccccattcacctttgggag
tgggaccaaggttgaaattaaaacgacaaccccggcccccagaccaccaacgccagcccccaccatcgccagccaac
ccctgtctctgagaccagaagcctgtaggcctgccgccggtggagctgtgcacacaagaggactggatttcgcctgt
gatatctacatttgggccccgctcgcaggcacatgtggagtgctcctcctctccctggtgattaccctgtactgcaa
aaggggccgcaaaaaactcctttacatttttaagcagccttttatgaggccagtacagacgactcaagaggaagacg
ggtgctcatgccgctttcctgaggaggaggaaggagggtgcgaactgcgcgttaagttctcccgatcagccgacgcg
cctgcttacaagcagggccagaaccaactgtacaacgagctgaatctcggtagacgggaagagtacgacgtgttgga
caaacggagaggccgcgacccagaaatgggcggcaagcctcgcaggaaaaacccccaggagggactgtacaatgagt
tgcagaaagataagatggcagaagcttatagcgagatcggaatgaagggggaaaggagacgagggaaaggacacgac
ggcctttatcagggcctgtccacagcaacaaaagatacgtatgacgccctccatatgcaggcacttccaccacggtg
ataa
(amino acids)
(SEQ ID NO: 301)
MALPVTALLLPLALLLHAARPEVQLVESGGGLVKPGGSLRLSCAASGFTESRYGMSWVRQAPGKRLEWVSTISGGGT
YIYYPDSVKGRFTISRDNAKNTLYLQMNSLRAEDTAVYYCTRDNYGRNYDYGMDYWGQGTLVTVSSGGGGSGGGGSG
GGGSEIVLTQSPATLSLSPGERATLTCSATSSVSYIHWYQQRPGQSPRLLIYSTSNLASGIPARFSGSGSGSDYTLT
ISSLEPEDFAVYYCQQRSSSPFTEGSGTKVEIKTTTPAPRPPTPAPTIASQPLSLRPEACRPAAGGAVHTRGLDFAC
DIYIWAPLAGTCGVLLLSLVITLYCKRGRKKLLYIFKQPFMRPVQTTQEEDGCSCRFPEEEEGGCELRVKFSRSADA
PAYKQGQNQLYNELNLGRREEYDVLDKRRGRDPEMGGKPRRKNPQEGLYNELQKDKMAEAYSEIGMKGERRRGKGHD
GLYQGLSTATKDTYDALHMQALPPR**
CAR-T E6 CD8/CD8/CD28/4-1BB/CD3z sequence:
N-CD81s-huMNE6scFv-CD8ecd fragment- CDB transmembrane- CD28- 4-1BB- CD3zeta-C
(DNA)
(SEQ ID NO: 303)
atggccctgcccgtgaccgctttgctgctccccctggcgctgctgctgcacgccgccaggccagaggtccagctggt
tgagagtggcggtgggctggttaagcctggcggctccctgcggctgagctgcgccgcgagtggatttactttcagcc
gatatgggatgagttgggtgcggcaagctcccgggaagaggctggaatgggtctcaacaatctccggggggggcact
tacatctattaccccgactcagtcaaggggagatttaccatttcacgagacaacgctaagaataccctgtatttgca
gatgaattctctgagagcagaggacacagctgtttactattgtacccgcgacaactatggcaggaactacgactacg
gtatggactattggggacaagggacattggttacagtgagcagtggcggcgggggcagcggaggaggaggcagcggt
ggggggggcagcgagatagtgctcacgcagtcacccgcgactctcagtctctcacctggggaacgagctaccctgac
gtgctctgctacctcctcagtgtcatatattcactggtatcagcaacggcccgggcagtcccctagattgctcattt
atagtacctctaatctggcctcaggtatccctgcacgattttctggatctggttcaggttctgattacaccctcact
atctctagcctggagcctgaagactttgccgtttattactgccagcagaggtctagctccccattcacctttgggag
tgggaccaaggttgaaattaaaacgacaaccccggcccccagaccaccaacgccagcccccaccatcgccagccaac
ccctgtctctgagaccagaagcctgtaggcctgccgccggtggagctgtgcacacaagaggactggatttcgcctgt
gatatctacatttgggccccgctcgcaggcacatgtggagtgctcctcctctccctggtgattaccctgtactgcag
aagcaagcggtctcggctcctgcattctgattacatgaacatgaccccaagaagaccaggccccaccaggaaacatt
accagccctacgctccgccacgcgacttcgctgcctaccggtccaaaaggggccgcaaaaaactcctttacattttt
aagcagccttttatgaggccagtacagacgactcaagaggaagacgggtgctcatgccgctttcctgaggaggagga
aggagggtgcgaactgcgcgttaagttctcccgatcagccgacgcgcctgcttacaagcagggccagaaccaactgt
acaacgagctgaatctcggtagacgggaagagtacgacgtgttggacaaacggagaggccgcgacccagaaatgggc
ggcaagcctcgcaggaaaaacccccaggagggactgtacaatgagttgcagaaagataagatggcagaagcttatag
cgagatcggaatgaagggggaaaggagacgagggaaaggacacgacggcctttatcagggcctgtccacagcaacaa
aagatacgtatgacgccctccatatgcaggcacttccaccacggtgataa
(amino acids)
(SEQ ID NO: 304)
MALPVTALLLPLALLLHAARPEVQLVESGGGLVKPGGSLRLSCAASGFTESRYGMSWVRQAPGKRLEWVSTISGGGT
YIYYPDSVKGRFTISRDNAKNTLYLQMNSLRAEDTAVYYCTRDNYGRNYDYGMDYWGQGTLVTVSSGGGGSGGGGSG
GGGSEIVLTQSPATLSLSPGERATLTCSATSSVSYIHWYQQRPGQSPRLLIYSTSNLASGIPARFSGSGSGSDYTLT
ISSLEPEDFAVYYCQQRSSSPFTEGSGTKVEIKTTTPAPRPPTPAPTIASQPLSLRPEACRPAAGGAVHTRGLDFAC
DIYIWAPLAGTCGVLLLSLVITLYCRSKRSRLLBSDYMNMTPRRPGPTRKHYQPYAPPRDFAAYRSKRGRKKLLYIF
KQPFMRPVQTTQEEDGCSCRFPEEEEGGCELRVKFSRSADAPAYKQGQNQLYNELNLGRREEYDVLDKRRGRDPEMG
GKPRRKNPQEGLYNELQKDKMAEAYSEIGMKGERRRGKGHDGLYQGLSTATKDTYDALHMQALPPR**
CAR-T C2 CD8/CD8/CD28/4-1BB/CD3z sequence:
N-CD81s-huMNC2scFv-CD8ecd fragment- CDB transmembrane- CD28- 4-1BB- CD3zeta-C
(DNA)
(SEQ ID NO: 306)
atggccttgccagtgacggccctgctgctgccattggctcttctgttgcacgctgccaggcctgaagtgcagctcgt
agagagtggcgggggactggtgaagcccggtggaagcctcagactcagttgcgccgcctcaggtttcactttttcag
gttacgccatgtcctgggtaagacaggcaccggggaaaggactcgagtgggtgtctactatcagctcaggaggcact
tatatatattatcctgactctgtaaaaggccgatttacgatttctcgcgacaatgcaaagaactccctctacctcca
aatgaacagtcttagggcagaagacactgctgtatactattgtgcacgcctcggcggcgacaactactacgagtact
ttgacgtgtgggggaaagggactaccgtgacagtttcaagcggaggaggtggctcaggtggaggcgggtcagggggg
ggaggaagtgatattgtgctcacacaatccccagcctccctggctgtgtctcccggccaacgcgctacaattacatg
tcgggcctccaaaagcgtgagcaccagcggctacagctacatgcactggtatcaacagaaaccaggacaacccccca
aactgttgatttatctcgcttcaaacttggagtccggcgtgcctgcgcgcttttcagggagtgggagcggcacagat
tttacgctgactatcaaccccgtagaagcaaacgatacagcgaattattattgtcaacattcccgggaactcccctt
tacgttcggcgggggcacaaaggtcgaaattaagagaaccacgacaaccccggcccccagaccaccaacgccagccc
ccaccatcgccagccaacccctgtctctgagaccagaagcctgtaggcctgccgccggtggagctgtgcacacaaga
ggactggatttcgcctgtgatatctacatttgggccccgctcgcaggcacatgtggagtgctcctcctctccctggt
gattaccctgtactgcagaagcaagcggtctcggctcctgcattctgattacatgaacatgaccccaagaagaccag
gccccaccaggaaacattaccagccctacgctccgccacgcgacttcgctgcctaccggtccaaaaggggccgcaaa
aaactcctttacatttttaagcagccttttatgaggccagtacagacgactcaagaggaagacgggtgctcatgccg
ctttcctgaggaggaggaaggagggtgcgaactgcgcgttaagttctcccgatcagccgacgcgcctgcttacaagc
agggccagaaccaactgtacaacgagctgaatctcggtagacgggaagagtacgacgtgttggacaaacggagaggc
cgcgacccagaaatgggcggcaagcctcgcaggaaaaacccccaggagggactgtacaatgagttgcagaaagataa
gatggcagaagcttatagcgagatcggaatgaagggggaaaggagacgagggaaaggacacgacggcctttatcagg
gcctgtccacagcaacaaaagatacgtatgacgccctccatatgcaggcacttccaccacggtgataa
(amino acids)
(SEQ ID NO: 307)
EVQLVESGGGLVKPGGSLRLSCAASGFTFSGYAMSWVRQAPGKGLEWVSTISSGGTYIYYPDSVKGRFTISRDNAKN
SLYLQMNSLRAEDTAVYYCARLGGDNYYEYFDVWGKGTTVTVSSGGGGSGGGGSGGGGSDIVLTQSPASLAVSPGQR
ATITCRASKSVSTSGYSYMHWYQQKPGQPPKLLIYLASNLESGVPARFSGSGSGTDFTLTINPVEANDTANYYCQHS
RELPFTEGGGTKVEIKRTTTTPAPRPPTPAPTIASQPLSLRPEACRPAAGGAVHTRGLDFACDIYIWAPLAGTCGVL
LLSLVITLYCRSKRSRLLHSDYMNMTPRRPGPTRKHYQPYAPPRDFAAYRSKRGRKKLLYIFKQPFMRPVQTTQEED
GCSCRFPEEEEGGCELRVKFSRSADAPAYKQGQNQLYNELNLGRREEYDVLDKRRGRDPEMGGKPRRKNPQEGLYNE
LQKDKMAEAYSEIGMKGERRRGKGHDGLYQGLSTATKDTYDALHMQALPPR**
Humanized E6 scFV sequence in CAR:
(DNA)
(SEQ ID NO: 341)
gaggtccagctggttgagagtggcggtgggctggttaagcctggcggctccctgcggctgagctgcgccgcgagtgg
atttactttcagccgatatgggatgagttgggtgcggcaagctcccgggaagaggctggaatgggtctcaacaatct
ccggggggggcacttacatctattaccccgactcagtcaaggggagatttaccatttcacgagacaacgctaagaat
accctgtatttgcagatgaattctctgagagcagaggacacagctgtttactattgtacccgcgacaactatggcag
gaactacgactacggtatggactattggggacaagggacattggttacagtgagcagtggcggcgggggcagcggag
gaggaggcagcggtggggggggcagcgagatagtgctcacgcagtcacccgcgactctcagtctctcacctggggaa
cgagctaccctgacgtgctctgctacctcctcagtgtcatatattcactggtatcagcaacggcccgggcagtcccc
tagattgctcatttatagtacctctaatctggcctcaggtatccctgcacgattttctggatctggttcaggttctg
attacaccctcactatctctagcctggagcctgaagactttgccgtttattactgccagcagaggtctagctcccca
ttcacctttgggagtgggaccaaggttgaaattaaa
(amino acids)
(SEQ ID NO: 342)
EVQLVESGGGLVKPGGSLRLSCAASGFTFSRYGMSWVRQAPGKRLEWVSTISGGGTYIYYPDSVKGRFTISRDNAKN
TLYLQMNSLRAEDTAVYYCTRDNYGRNYDYGMDYWGQGTLVTVSSGGGGSGGGGSGGGGSEIVLTQSPATLSLSPGE
RATLTCSATSSVSYIHWYQQRPGQSPRLLIYSTSNLASGIPARFSGSGSGSDYTLTISSLEPEDFAVYYCQQRSSSP
FTFGSGTKVEIK
CD8 leader sequence:
(DNA)
(SEQ ID NO: 343)
atggccctgcccgtgaccgctttgctgctccccctggcgctgctgctgcacgccgccaggcca
(amino acids)
(SEQ ID NO: 344)
MALPVTALLLPLALLLHAARP
CD8 hinge domain sequence:
(DNA)
(SEQ ID NO: 345)
acgacaaccccggcccccagaccaccaacgccagcccccaccatcgccagccaacccctgtctctgagaccagaagc
ctgtaggcctgccgccggtggagctgtgcacacaagaggactggatttcgcctgtgat
(amino acids)
(SEQ ID NO: 346)
TTTPAPRPPTPAPTIASQPLSLRPEACRPAAGGAVHTRGLDFACD
CD4 hinge domain sequence:
(DNA)
(SEQ ID NO: 347)
tcgggacaggtcctgctggaatccaacatcaaggttctgcccacatggtccaccccggtgcagcca
(amino acids)
(SEQ ID NO: 348)
SGQVLLESNIKVLPTWSTPVQP
CD28 hinge domain sequence:
(DNA)
(SEQ ID NO: 349)
aaacacctttgtccaagtcccctatttcccggaccttctaagccc
(amino acids)
(SEQ ID NO: 350)
KHLCPSPLFPGPSKP
CD3 zeta transmembrane domain sequence:
(DNA)
(SEQ ID NO: 361)
ctctgctacctgctggatggaatcctcttcatctatggtgtcattctcactgccttgttcctg
(amino acids)
(SEQ ID NO: 362)
LCYLLDGILFIYGVILTALFL
CD8 transmembrane domain sequence:
(DNA)
(SEQ ID NO: 363)
atctacatttgggccccgctcgcaggcacatgtggagtgctcctcctctccctggtgattaccctgtactgc
(amino acids)
(SEQ ID NO: 364)
IYIWAPLAGTCGVLLLSLVITLYC
CD4 transmembrane domain sequence:
(DNA)
(SEQ ID NO: 365)
atggccctgattgtgctggggggcgtcgccggcctcctgcttttcattgggctaggcatcttcttc
(amino acids)
(SEQ ID NO: 366)
MALIVLGGVAGLLLFIGLGIFF
CD28 transmembrane domain sequence:
(DNA)
(SEQ ID NO: 367)
ttttgggtgctggtggtggttggtggagtcctggcttgctatagcttgctagtaacagtggcctttattattttctg
ggtg
(amino acids)
(SEQ ID NO: 368)
FWVLVVVGGVLACYSLLVTVAFIIFWV
4-1BB transmembrane domain sequence:
(DNA)
(SEQ ID NO: 369)
atcatctccttctttcttgcgctgacgtcgactgcgttgctcttcctgctgttcttcctcacgctccgtttctctgt
tgtt
(amino acids)
(SEQ ID NO: 370)
IISFFLALTSTALLFLLFFLTLRFSVV
OX40 transmembrane domain sequence:
(DNA)
(SEQ ID NO: 371)
gttgccgccatcctgggcctgggcctggtgctggggctgctgggccccctggccatcctgctggccctgtacctgct
C
(amino acids)
(SEQ ID NO: 372)
VAAILGLGLVLGLLGPLAILLALYLL
CD3 zeta domain sequence:
(DNA)
(SEQ ID NO: 373)
cgcgttaagttctcccgatcagccgacgcgcctgcttacaagcagggccagaaccaactgtacaacgagctgaatct
cggtagacgggaagagtacgacgtgttggacaaacggagaggccgcgacccagaaatgggcggcaagcctcgcagga
aaaacccccaggagggactgtacaatgagttgcagaaagataagatggcagaagcttatagcgagatcggaatgaag
ggggaaaggagacgagggaaaggacacgacggcctttatcagggcctgtccacagcaacaaaagatacgtatgacgc
cctccatatgcaggcacttccaccacgg
(amino acids)
(SEQ ID NO: 374)
RVKFSRSADAPAYKQGQNQLYNELNLGRREEYDVLDKRRGRDPEMGGKPRRKNPQEGLYNELQKDKMAEAYSEIGMK
GERRRGKGHDGLYQGLSTATKDTYDALHMQALPPR
CD3 zeta domain variant sequence:
(DNA)
(SEQ ID NO: 375)
agagtgaagttcagcaggagcgcagacgcccccgcgtaccagcagggccagaaccagctctataacgagctcaatct
aggacgaagagaggagtacgatgttttggacaagagacgtggccgggaccctgagatggggggaaagccgagaagga
agaaccctcaggaaggcctgtacaatgaactgcagaaagataagatggcggaggcctacagtgagattgggatgaaa
ggcgagcgccggaggggcaaggggcacgatggcctttaccagggtctcagtacagccaccaaggacacctacgacgc
ccttcacatgcaggccctgccccctcgc
(amino acids)
(SEQ ID NO: 376)
RVKFSRSADAPAYQQGQNQLYNELNLGRREEYDVLDKRRGRDPEMGGKPRRKNPQEGLYNELQKDKMAEAYSEIGMK
GERRRGKGHDGLYQGLSTATKDTYDALHMQALPPR
CD28 domain sequence:
(DNA)
(SEQ ID NO: 377)
agaagcaagcggtctcggctcctgcattctgattacatgaacatgaccccaagaagaccaggccccaccaggaaaca
ttaccagccctacgctccgccacgcgacttcgctgcctaccggtcc
(amino acids)
(SEQ ID NO: 378)
RSKRSRLLHSDYMNMTPRRPGPTRKHYQPYAPPRDFAAYRS
4-1BB domain sequence:
(DNA)
(SEQ ID NO: 379)
aaaaggggccgcaaaaaactcctttacatttttaagcagccttttatgaggccagtacagacgactcaagaggaaga
cgggtgctcatgccgctttcctgaggaggaggaaggagggtgcgaactg
(amino acids)
(SEQ ID NO: 380)
KRGRKKLLYIFKQPFMRPVQTTQEEDGCSCRFPEEEEGGCEL
HumanizeE6 scFV (VH-VL) sequence:
(DNA)
(SEQ ID NO: 391)
gaggtgcagctggtggagtctgggggaggcctggtcaagcctggggggtccctgagactctcctgtgcagcctctgg
attcaccttcagtaggtatggcatgagctgggtccgccaggctccagggaagaggctggagtgggtctcaaccatta
gtggcggaggcacctacatatactacccagactcagtgaagggccgattcaccatctccagagacaacgccaagaac
accctgtatctgcaaatgaacagcctgagagccgaggacacggctgtgtattactgtaccagagataactatggccg
caactatgattatggcatggattattggggccagggcaccctggtgaccgtgagcagcggcggtggcggatccggcg
gtggcggatccggcggtggcggatccgaaattgtgttgacacagtctccagccaccctgtctttgtctccaggggaa
agagccaccctcacctgcagcgccaccagcagtgttagctacatccactggtaccaacagaggcctggccagagccc
caggctcctcatctatagcacctccaacctggccagcggcatcccagccaggttcagtggcagtgggtctgggagcg
actacactctcaccatcagcagcctagagcctgaagattttgcagtttattactgtcagcagcgtagcagctcccct
ttcacctttggcagcggcaccaaagtggaaattaaa
(amino acids)
(SEQ ID NO: 392)
EVQLVESGGGLVKPGGSLRLSCAASGFTFSRYGMSWVRQAPGKRLEWVSTISGGGTYIYYPDSVKGRFTISRDNAKN
TLYLQMNSLRAEDTAVYYCTRDNYGRNYDYGMDYWGQGTLVTVSSGGGGSGGGGSGGGGSEIVLTQSPATLSLSPGE
RATLTCSATSSVSYIHWYQQRPGQSPRLLIYSTSNLASGIPARFSGSGSGSDYTLTISSLEPEDFAVYYCQQRSSSP
FTFGSGTKVEIK
HumanizeE6 scFV (VL-VH) sequence:
(DNA)
(SEQ ID NO: 393)
gaaattgtgttgacacagtctccagccaccctgtctttgtctccaggggaaagagccaccctcacctgcagcgccac
cagcagtgttagctacatccactggtaccaacagaggcctggccagagccccaggctcctcatctatagcacctcca
acctggccagcggcatcccagccaggttcagtggcagtgggtctgggagcgactacactctcaccatcagcagccta
gagcctgaagattttgcagtttattactgtcagcagcgtagcagctcccctttcacctttggcagcggcaccaaagt
ggaaattaaaggcggtggcggatccggcggtggcggatccggcggtggcggatccgaggtgcagctggtggagtctg
ggggaggcctggtcaagcctggggggtccctgagactctcctgtgcagcctctggattcaccttcagtaggtatggc
atgagctgggtccgccaggctccagggaagaggctggagtgggtctcaaccattagtggcggaggcacctacatata
ctacccagactcagtgaagggccgattcaccatctccagagacaacgccaagaacaccctgtatctgcaaatgaaca
gcctgagagccgaggacacggctgtgtattactgtaccagagataactatggccgcaactatgattatggcatggat
tattggggccagggcaccctggtgaccgtgagcagc
(amino acids)
(SEQ ID NO: 394)
EIVLTQSPATLSLSPGERATLTCSATSSVSYIHWYQQRPGQSPRLLIYSTSNLASGIPARFSGSGSGSDYTLTISSL
EPEDFAVYYCQQRSSSPFTFGSGTKVEIKGGGGSGGGGSGGGGSEVQLVESGGGLVKPGGSLRLSCAASGFTFSRYG
MSWVRQAPGKRLEWVSTISGGGTYIYYPDSVKGRFTISRDNAKNTLYLQMNSLRAEDTAVYYCTRDNYGRNYDYGMD
YWGQGTLVTVSS
HumanizeC2 scFV (VH-VL) sequence:
(DNA)
(SEQ ID NO: 395)
gaggtgcagctggtggagtctgggggaggcctggtcaagcctggggggtccctgagactctcctgtgcagcctctgg
attcaccttcagtggctatgccatgagctgggtccgccaggctccagggaaggggctggagtgggtctcaaccatta
gtagtggcggaacctacatatactaccccgactcagtgaagggccgattcaccatctccagagacaacgccaagaac
tcactgtatctgcaaatgaacagcctgagagccgaggacacggccgtgtattactgtgcgagacttgggggggataa
ttactacgaatacttcgatgtctggggcaaagggaccacggtcaccgtctcctccggcggtggcggatccggcggtg
gcggatccggcggtggcggatccgacattgtgctgacccagtctccagcctccttggccgtgtctccaggacagagg
gccaccatcacctgcagagccagtaagagtgtcagtaccagcggatactcctacatgcactggtatcagcagaaacc
aggacaacctcctaaactcctgatttacctggcatccaatctggagagcggggtcccagccaggttcagcggcagtg
ggtctgggaccgatttcaccctcacaattaatcctgtggaagctaatgatactgcaaattattactgtcagcacagt
agggagctgcctttcacattcggcggagggaccaaggtggagatcaaacgaact
(amino acids)
(SEQ ID NO: 396)
EVQLVESGGGLVKPGGSLRLSCAASGFTFSGYAMSWVRQAPGKGLEWVSTISSGGTYIYYPDSVKGRFTISRDNAKN
SLYLQMNSLRAEDTAVYYCARLGGDNYYEYFDVWGKGTTVTVSSGGGGSGGGGSGGGGSDIVLTQSPASLAVSPGQR
ATITCRASKSVSTSGYSYMHWYQQKPGQPPKLLIYLASNLESGVPARFSGSGSGTDFTLTINPVEANDTANYYCQHS
RELPFTFGGGTKVEIKRT
HumanizeE6 scFV (VL-VH) sequence:
(DNA)
(SEQ ID NO: 397)
gacattgtgctgacccagtctccagcctccttggccgtgtctccaggacagagggccaccatcacctgcagagccag
taagagtgtcagtaccagcggatactcctacatgcactggtatcagcagaaaccaggacaacctcctaaactcctga
tttacctggcatccaatctggagagcggggtcccagccaggttcagcggcagtgggtctgggaccgatttcaccctc
acaattaatcctgtggaagctaatgatactgcaaattattactgtcagcacagtagggagctgcctttcacattcgg
cggagggaccaaggtggagatcaaacgaactggcggtggcggatccggcggtggcggatccggcggtggcggatccg
aggtgcagctggtggagtctgggggaggcctggtcaagcctggggggtccctgagactctcctgtgcagcctctgga
ttcaccttcagtggctatgccatgagctgggtccgccaggctccagggaaggggctggagtgggtctcaaccattag
tagtggcggaacctacatatactaccccgactcagtgaagggccgattcaccatctccagagacaacgccaagaact
cactgtatctgcaaatgaacagcctgagagccgaggacacggccgtgtattactgtgcgagacttgggggggataat
tactacgaatacttcgatgtctggggcaaagggaccacggtcaccgtctcctcc
(amino acids)
(SEQ ID NO: 398)
DIVLTQSPASLAVSPGQRATITCRASKSVSTSGYSYMHWYQQKPGQPPKLLIYLASNLESGVPARFSGSGSGTDFTL
TINPVEANDTANYYCQHSRELPFTFGGGTKVEIKRTGGGGSGGGGSGGGGSEVQLVESGGGLVKPGGSLRLSCAASG
FTFSGYAMSWVRQAPGKGLEWVSTISSGGTYIYYPDSVKGRFTISRDNAKNSLYLQMNSLRAEDTAVYYCARLGGDN
YYEYFDVWGKGTTVTVSS
G₄S₁ linker sequence:
(DNA)
(SEQ ID NO: 399)
ggcggtggcggatcc
(amino acids)
(SEQ ID NO: 400)
GGGGS
[G₄S₁]x3 linker sequence:
(DNA)
(SEQ ID NO: 401)
ggcggtggcggatccggcggtggcggatccggcggtggcggatcc
(amino acids)
(SEQ ID NO: 402)
GGGGSGGGGSGGGGS
8 aa GS linker sequence:
(DNA)
(SEQ ID NO: 403)
ggcggttccggcggtggatccgga
(amino acids)
(SEQ ID NO: 404)
GGSGGGSG
12 aa GS linker sequence:
(DNA)
(SEQ ID NO: 405)
ggcggttccggcggtggatccggcggtggcggatccgga
(amino acids)
(SEQ ID NO: 406)
GGSGGGSGGGSG
13 aa GS linker sequence:
(DNA)
(SEQ ID NO: 407)
ggcggtggatccggcggtggcggatccggcggtggatcc
(amino acids)
(SEQ ID NO: 408)
GGGSGGGGSGGGS
22 aa GS linker sequence:
(DNA)
(SEQ ID NO: 409)
ggcggtggaagcggcggtggcggatccggcagcggcggaagcggcggtggcggatccggcggtgga
(amino acids)
(SEQ ID NO: 410)
GGGSGGGGSGSGGSGGGGSGGG
24 aa GS linker sequence:
(DNA)
(SEQ ID NO: 411)
ggcggttccggcggtggatccggcggtggcggatccggaggcggttccggcggtggatccggcggtggcggatccgg
a
(amino acids)
(SEQ ID NO: 412)
GGSGGGSGGGSGGGSGGGSGGGSG
Mouse C3 Heavy chain variable region sequence:
(DNA)
(SEQ ID NO: 413)
caggtccagctgcagcagtctgggcctgagctggtgaggcctggggtctcagtgaagatttcctgcaagggttccgg
ctacagattcactgattatgctatgaactgggtgaagcagagtcatgcaaagagtctagagtggattggagttatta
gtactttctctggtaatacaaacttcaaccagaagtttaagggcaaggccacaatgactgtagacaaatcctccagc
acagcctatatggaacttgccagattgacatctgaggattctgccatgtattactgtgcaagatcggattactacgg
cccatactttgactactggggccaaggcaccactctcacagtctcctca
(amino acids)
(SEQ ID NO: 414)
QVQLQQSGPELVRPGVSVKISCKGSGYRFTDYAMNWVKQSHAKSLEWIGVISTFSGMTNENQKFKGKATMTVDKSSS
TAYMELARLTSEDSAMYYCARSDYYGPYFDYWGQGTTLTVSS
Mouse C3 heavy chain variable framework region 1 (FWR1) sequence:
(DNA)
(SEQ ID NO: 415)
caggtccagctgcagcagtctgggcctgagctggtgaggcctggggtctcagtgaagatttcctgcaagggttccgg
ctacagattcact
(amino acids)
(SEQ ID NO: 416)
QVQLQQSGPELVRPGVSVKISCKGSGYRFT
Mouse C3 heavy chain variable complementarity determining regions 1 (CDR1)
sequence:
(DNA)
(SEQ ID NO: 417)
gattatgctatgaac
(amino acids)
(SEQ ID NO: 418)
DYAMN
Mouse C3 heavy chain variable framework region 2 (FWR2) sequence:
(DNA)
(SEQ ID NO: 419)
tgggtgaagcagagtcatgcaaagagtctagagtggattgga
(amino acids)
(SEQ ID NO: 420)
WVKQSHAKSLEWIG
Mouse C3 heavy chain variable complementarity determining regions 2 (CDR2)
sequence:
(DNA)
(SEQ ID NO: 421)
gttattagtactttctctggtaatacaaacttcaaccagaagtttaagggc
(amino acids)
(SEQ ID NO: 422)
VISTFSGNTNFNQKFKG
Mouse C3 heavy chain variable framework region 3 (FWR3) acid sequence:
(DNA)
(SEQ ID NO: 423)
aaggccacaatgactgtagacaaatcctccagcacagcctatatggaacttgccagattgacatctgaggattctgc
catgtattactgtgcaaga
(amino acids)
(SEQ ID NO: 424)
KATMTVDKSSSTAYMELARLTSEDSAMYYCAR
Mouse C3 heavy chain variable complementarity determining regions 3 (CDR3)
sequence:
(DNA)
(SEQ ID NO: 425)
tcggattactacggcccatactttgactac
(amino acids)
(SEQ ID NO: 426)
SDYYGPYFDY
Humanized C3 heavy chain variable region sequence from IGHV1-18*04:
(DNA)
(SEQ ID NO: 439)
caggttcagctggtgcagtctggagctgaggtgaagaagcctggggcctcagtgaaggtctcctgcaaggcttctgg
ttacacctttaccgactacgccatgaactgggtgcgacaggcccctggacaagggcttgagtggatgggagtgatca
gcaccttcagcggtaacacaaacttcaaccagaagttcaagggcagagtcaccatgaccacagacacatccacgagc
acagcctacatggagctgaggagcctgagatctgacgacacggccgtgtattactgtgcgagaagcgactactacgg
cccatacttcgactactggggccagggcaccaccctgaccgtgtccagc
(amino acids)
(SEQ ID NO: 440)
QVQLVQSGAEVKKPGASVKVSCKASGYTFTDYAMNWVRQAPGQGLEWMGVISTFSGNTNFNQKFKGRVTMTTDTSTS
TAYMELRSLRSDDTAVYYCARSDYYGPYFDYWGQGTTLTVSS
Humanized C3 heavy chain variable framework region 1 (FWR1) acid sequence:
(DNA)
(SEQ ID NO: 441)
caggttcagctggtgcagtctggagctgaggtgaagaagcctggggcctcagtgaaggtctcctgcaaggcttctgg
ttacacctttacc
(amino acids)
(SEQ ID NO: 442)
QVQLVQSGAEVKKPGASVKVSCKASGYTFT
Humanized C3 heavy chain variable complementarity determining regions 1 (CDR1)
sequence:
(DNA)
(SEQ ID NO: 443)
gactacgccatgaac
(amino acids)
(SEQ ID NO: 444)
DYAMN
Humanized C3 heavy chain variable framework region 2 (FWR2) acid sequence:
(DNA)
(SEQ ID NO: 445)
tgggtgcgacaggcccctggacaagggcttgagtggatggga
(amino acids)
(SEQ ID NO: 446)
WVRQAPGQGLEWMG
Humanized C3 heavy chain variable complementarity determining regions 2
(CDR2) sequence:
(DNA)
(SEQ ID NO: 447)
gtgatcagcaccttcagcggtaacacaaacttcaaccagaagttcaagggc
(amino acids)
(SEQ ID NO: 448)
VISTFSGNTNFNQKFKG
Humanized C3 heavy chain variable framework region 3 (FWR3) acid sequence:
(DNA)
(SEQ ID NO: 449)
agagtcaccatgaccacagacacatccacgagcacagcctacatggagctgaggagcctgagatctgacgacacggc
cgtgtattactgtgcgaga
(amino acids)
(SEQ ID NO: 450)
RVTMTTDTSTSTAYMELRSLRSDDTAVYYCAR
Humanized C3 heavy chain variable complementarity determining regions 3
(CDR3) sequence:
(DNA)
(SEQ ID NO: 451)
agcgactactacggcccatacttcgactac
(amino acids)
(SEQ ID NO: 452)
SDYYGPYFDY
Humanized C3 IgG1 heavy chain sequence
(DNA)
(SEQ ID NO: 453)
caggttcagctggtgcagtctggagctgaggtgaagaagcctggggcctcagtgaaggtctcctgcaaggcttctgg
ttacacctttaccgactacgccatgaactgggtgcgacaggcccctggacaagggcttgagtggatgggagtgatca
gcaccttcagcggtaacacaaacttcaaccagaagttcaagggcagagtcaccatgaccacagacacatccacgagc
acagcctacatggagctgaggagcctgagatctgacgacacggccgtgtattactgtgcgagaagcgactactacgg
cccatacttcgactactggggccagggcaccaccctgaccgtgtccagcgctagcaccaagggcccatcggtcttcc
ccctggcaccctcctccaagagcacctctgggggcacagcggccctgggctgcctggtcaaggactacttccccgaa
ccggtgacggtgtcgtggaactcaggcgccctgaccagcggcgtgcacaccttcccggctgtcctacagtcctcagg
actctactccctcagcagcgtggtgacagtgccctccagcagcttgggcacccagacctacatctgcaacgtgaatc
acaagcccagcaacaccaaggtggacaagaaagttgagcccaaatcttgtgacaaaactcacacatgcccaccgtgc
ccagcacctgaactcctggggggaccgtcagtcttcctcttccccccaaaacccaaggacaccctcatgatctcccg
gacccctgaggtcacatgcgtggtggtggacgtgagccacgaagaccctgaggtcaagttcaactggtacgtggacg
gcgtggaggtgcataatgccaagacaaagccgcgggaggagcagtacaacagcacgtaccgtgtggtcagcgtcctc
accgtcctgcaccaggactggctgaatggcaaggagtacaagtgcaaggtctccaacaaagccctcccagcccccat
cgagaaaaccatctccaaagccaaagggcagccccgagaaccacaggtgtacaccctgcccccatcccgggaggaga
tgaccaagaaccaggtcagcctgacctgcctggtcaaaggcttctatcccagcgacatcgccgtggagtgggagagc
aatgggcagccggagaacaactacaagaccacgcctcccgtgctggactccgacggctccttcttcctctacagcaa
gctcaccgtggacaagagcaggtggcagcaggggaacgtcttctcatgctccgtgatgcatgaggctctgcacaacc
actacacgcagaagagcctctccctgtctccgggtaaatgataa
(amino acids)
(SEQ ID NO: 454)
QVQLVQSGAEVKKPGASVKVSCKASGYTFTDYAMNWVRQAPGQGLEWMGVISTFSGNTNFNQKFKGRVTMTTDTSTS
TAYMELRSLRSDDTAVYYCARSDYYGPYFDYWGQGTTLTVSSASTKGPSVFPLAPSSKSTSGGTAALGCLVKDYFPE
PVTVSWNSGALTSGVHTFPAVLQSSGLYSLSSVVTVPSSSLGTQTYICNVNHKPSNTKVDKKVEPKSCDKTHTCPPC
PAPELLGGPSVFLEPPKPKDTLMISRTPEVTCVVVDVSHEDPEVKFNWYVDGVEVHNAKTKPREEQYNSTYRVVSVL
TVLHQDWLNGKEYKCKVSNKALPAPIEKTISKAKGQPREPQVYTLPPSREEMTKNQVSLTCLVKGFYPSDIAVEWES
NGQPENNYKTTPPVLDSDGSFFLYSKLTVDKSRWQQGNVESCSVMHEALHNHYTQKSLSLSPGK**
Humanized C3 IgG2 heavy chain sequence
(DNA)
(SEQ ID NO: 455)
caggttcagctggtgcagtctggagctgaggtgaagaagcctggggcctcagtgaaggtctcctgcaaggcttctgg
ttacacctttaccgactacgccatgaactgggtgcgacaggcccctggacaagggcttgagtggatgggagtgatca
gcaccttcagcggtaacacaaacttcaaccagaagttcaagggcagagtcaccatgaccacagacacatccacgagc
acagcctacatggagctgaggagcctgagatctgacgacacggccgtgtattactgtgcgagaagcgactactacgg
cccatacttcgactactggggccagggcaccaccctgaccgtgtccagcgcctccaccaagggcccatcggtcttcc
ccctggcgccctgctccaggagcacctccgagagcacagccgccctgggctgcctggtcaaggactacttccccgaa
ccggtgacggtgtcgtggaactcaggcgctctgaccagcggcgtgcacaccttcccagctgtcctacagtcctcagg
actctactccctcagcagcgtggtgaccgtgccctccagcaacttcggcacccagacctacacctgcaacgtagatc
acaagcccagcaacaccaaggtggacaagacagttgagcgcaaatgttgtgtcgagtgcccaccgtgcccagcacca
cctgtggcaggaccgtcagtcttcctcttccccccaaaacccaaggacaccctcatgatctcccggacccctgaggt
cacgtgcgtggtggtggacgtgagccacgaagaccccgaggtccagttcaactggtacgtggacggcgtggaggtgc
ataatgccaagacaaagccacgggaggagcagttcaacagcacgttccgtgtggtcagcgtcctcaccgttgtgcac
caggactggctgaacggcaaggagtacaagtgcaaggtctccaacaaaggcctcccagcccccatcgagaaaaccat
ctccaaaaccaaagggcagccccgagaaccacaggtgtacaccctgcccccatcccgggaggagatgaccaagaacc
aggtcagcctgacctgcctggtcaaaggcttctaccccagcgacatcgccgtggagtgggagagcaatgggcagccg
gagaacaactacaagaccacacctcccatgctggactccgacggctccttcttcctctacagcaagctcaccgtgga
caagagcaggtggcagcaggggaacgtcttctcatgctccgtgatgcatgaggctctgcacaaccactacacgcaga
agagcctctccctgtctccgggtaaatagtaa
(amino acids)
(SEQ ID NO: 456)
QVQLVQSGAEVKKPGASVKVSCKASGYTFTDYAMNWVRQAPGQGLEWMGVISTFSGNTNFNQKFKGRVTMTTDTSTS
TAYMELRSLRSDDTAVYYCARSDYYGPYFDYWGQGTTLTVSSASTKGPSVFPLAPCSRSTSESTAALGCLVKDYFPE
PVTVSWNSGALTSGVHTFPAVLQSSGLYSLSSVVTVPSSNFGTQTYTCNVDHKPSNTKVDKTVERKCCVECPPCPAP
PVAGPSVFLFPPKPKDTLMISRTPEVTCVVVDVSHEDPEVQFNWYVDGVEVHNAKTKPREEQFNSTFRVVSVLTVVH
QDWLNGKEYKCKVSNKGLPAPIEKTISKTKGQPREPQVYTLPPSREEMTKNQVSLTCLVKGFYPSDIAVEWESNGQP
ENNYKTTPPMLDSDGSFFLYSKLTVDKSRWQQGNVFSCSVMHEALHNHYTQKSLSLSPGK**
Mouse C3 Light Chain variable region sequence:
(DNA)
(SEQ ID NO: 458)
gatgttttgatgacccaaactccactctccctgcctgtcagtcttggagatcaagcctccatctcttgcagatctag
tcagaccattgtacatagtaatggaaacacctatttagaatggtacctgcagaaaccaggccagtctccaaagctcc
tgatctacaaagtttccaaccgattttctggggtcccagacaggttcagtggcagtggatcagggacagatttcaca
ctcaagatcaacagagtggaggctgaggatctgggagtttattactgctttcaaggttcacatgttccattcacgtt
cggctcggggacaaagttggaaataaaa
(amino acids)
(SEQ ID NO: 459)
DVLMTQTPLSLPVSLGDQASISCRSSQTIVHSNGNTYLEWYLQKPGQSPKLLIYKVSNRFSGVPDRFSGSGSGTDFT
LKINRVEAEDLGVYYCFQGSHVPFTFGSGTKLEIK
Mouse C3 light chain variable framework region 1 (FWR1) sequence :
(DNA)
(SEQ ID NO: 460)
gatgttttgatgacccaaactccactctccctgcctgtcagtcttggagatcaagcctccatctcttgc
(amino acids)
(SEQ ID NO: 461)
DVLMTQTPLSLPVSLGDQASISC
Mouse C3 light chain variable complementarity determining regions 1 (CDR1)
sequence:
(DNA)
(SEQ ID NO: 462)
agatctagtcagaccattgtacatagtaatggaaacacctatttagaa
(amino acids)
(SEQ ID NO: 463)
RSSQTIVHSNGNTYLE
Mouse C3 light chain variable framework region 2 (FWR2) sequence:
(DNA)
(SEQ ID NO: 464)
tggtacctgcagaaaccaggccagtctccaaagctcctgatctac
(amino acids)
(SEQ ID ON: 465)
WYLQKPGQSPKLLIY
Mouse C3 light chain variable complementarity determining regions 2 (CDR2)
sequence:
(DNA)
(SEQ ID NO: 466)
aaagtttccaaccgattttct
(amino acids)
(SEQ ID NO: 467)
KVSNRFS
Mouse C3 light chain variable framework region 3 (FWR3) sequence:
(DNA)
(SEQ ID NO: 468)
ggggtcccagacaggttcagtggcagtggatcagggacagatttcacactcaagatcaacagagtggaggctgagga
tctgggagtttattactgc
(amino acids)
(SEQ ID NO: 469)
GVPDRFSGSGSGTDFTLKINRVEAEDLGVYYC
Mouse C3 light chain variable complementarity determining regions 3 (CDR3)
sequence:
(DNA)
(SEQ ID NO: 470)
tttcaaggttcacatgttccattcacg
(amino acids)
(SEQ ID NO: 471)
FQGSHVPFT
Humanized C3 light chain variable region sequence from IGKV2-29*03:
(DNA)
(SEQ ID NO: 486)
gatattgtgatgacccagactccactctctctgtccgtcacccctggacagccggcctccatctcctgcaggtctag
tcagaccattgtccatagtaatggaaacacctatttggagtggtacctgcagaagccaggccagtctccacagctcc
tgatctataaggtttccaaccggttctctggagtgccagataggttcagtggcagcgggtcagggacagatttcaca
ctgaaaatcagccgggtggaggctgaggatgttggggtttattactgcttccaaggtagccacgtgcctttcacctt
cggcggagggaccaaggtggagatcaaacgaact
(amino acids)
(SEQ ID NO: 487)
DIVMTQTPLSLSVTPGQPASISCRSSQTIVHSNGNTYLEWYLQKPGQSPQLLIYKVSNRFSGVPDRFSGSGSGTDFT
LKISRVEAEDVGVYYCFQGSHVPFTFGGGTKVEIKRT
Humanized C3 light chain variable framework region 1 (FWR1) acid sequence:
(DNA)
(SEQ ID NO: 488)
gatattgtgatgacccagactccactctctctgtccgtcacccctggacagccggcctccatctcctgc
(amino acids)
(SEQ ID NO: 489)
DIVMTQTPLSLSVTPGQPASISC
Humanized C3 light chain variable complementarity determining regions 1 (CDR1)
sequence:
(DNA)
(SEQ ID NO: 490)
ggtctagtcagaccattgtccatagtaatggaaacacctatttggag
(amino acids)
(SEQ ID NO: 491)
RSSQTIVHSNGNTYLE
Humanized C3 light chain variable framework region 2 (FWR2) acid sequence:
(DNA)
(SEQ ID NO: 492)
tggtacctgcagaagccaggccagtctccacagctcctgatctat
(amino acids)
(SEQ ID NO: 493)
WYLQKPGQSPQLLIY
Humanized C3 light chain variable complementarity determining regions 2
(CDR2) sequence:
(DNA)
(SEQ ID NO: 494)
aaggtttccaaccggttctct
(amino acids)
(SEQ ID NO: 495)
KVSNRFS
Humanized C3 light chain variable framework region 3 (FWR3) acid sequence:
(DNA)
(SEQ ID NO: 496)
ggagtgccagataggttcagtggcagcgggtcagggacagatttcacactgaaaatcagccgggtggaggctgagga
tgttggggtttattactgc
(amino acids)
(SEQ ID NO: 497)
GVPDRFSGSGSGTDFTLKISRVEAEDVGVYYC
Humanized C3 light chain variable complementarity determining regions 3
(CDR3) sequence:
(DNA)
(SEQ ID NO: 498)
ttccaaggtagccacgtgcctttcacc
(amino acids)
(SEQ ID NO: 499)
FQGSHVPFT
Humanized C3 lambda light chain sequence
(DNA)
(SEQ ID NO: 500)
gatattgtgatgacccagactccactctctctgtccgtcacccctggacagccggcctccatctcctgcaggtctag
tcagaccattgtccatagtaatggaaacacctatttggagtggtacctgcagaagccaggccagtctccacagctcc
tgatctataaggtttccaaccggttctctggagtgccagataggttcagtggcagcgggtcagggacagatttcaca
ctgaaaatcagccgggtggaggctgaggatgttggggtttattactgcttccaaggtagccacgtgcctttcacctt
cggcggagggaccaaggtggagatcaaacgaactggtcagcccaaggctgccccctcggtcactctgttcccgccct
cctctgaggagcttcaagccaacaaggccacactggtgtgtctcataagtgacttctacccgggagccgtgacagtg
gcctggaaggcagatagcagccccgtcaaggcgggagtggagaccaccacaccctccaaacaaagcaacaacaagta
cgcggccagcagctatctgagcctgacgcctgagcagtggaagtcccacagaagctacagctgccaggtcacgcatg
aagggagcaccgtggagaagacagtggcccctacagaatgttcatagtaa
(amino acids)
(SEQ ID NO: 501)
DIVMTQTPLSLSVTPGQPASISCRSSQTIVHSNGNTYLEWYLQKPGQSPQLLIYKVSNRFSGVPDRFSGSGSGTDFT
LKISRVEAEDVGVYYCFQGSHVPFTFGGGTKVEIKRTGQPKAAPSVTLFPPSSEELQANKATLVCLISDFYPGAVTV
AWKADSSPVKAGVETTTPSKQSNNKYAASSYLSLTPEQWKSHRSYSCQVTHEGSTVEKTVAPTECS**
Humanized C3 Kappa light chain
(DNA)
(SEQ ID NO: 502)
gatattgtgatgacccagactccactctctctgtccgtcacccctggacagccggcctccatctcctgcaggtctag
tcagaccattgtccatagtaatggaaacacctatttggagtggtacctgcagaagccaggccagtctccacagctcc
tgatctataaggtttccaaccggttctctggagtgccagataggttcagtggcagcgggtcagggacagatttcaca
ctgaaaatcagccgggtggaggctgaggatgttggggtttattactgcttccaaggtagccacgtgcctttcacctt
cggcggagggaccaaggtggagatcaaacgaactacggtggctgcaccatctgtcttcatcttcccgccatctgatg
agcagttgaaatctggaactgcctctgttgtgtgcctgctgaataacttctatcccagagaggccaaagtacagtgg
aaggtggataacgccctccaatcgggtaactcccaggagagtgtcacagagcaggacagcaaggacagcacctacag
cctcagcagcaccctgacgctgagcaaagcagactacgagaaacacaaagtctacgcctgcgaagtcacccatcagg
gcctgagctcgcccgtcacaaagagcttcaacaggggagagtgttagtaa
(amino acids)
(SEQ ID NO: 503)
DIVMTQTPLSLSVTPGQPASISCRSSQTIVHSNGNTYLEWYLQKPGQSPQLLIYKVSNRFSGVPDRFSGSGSGTDFT
LKISRVEAEDVGVYYCFQGSHVPFTFGGGTKVEIKRTTVAAPSVFIFPPSDEQLKSGTASVVCLLNNFYPREAKVQW
KVDNALQSGNSQESVTEQDSKDSTYSLSSTLTLSKADYEKHKVYACEVTHQGLSSPVTKSFNRGEC**
Mouse C8 heavy chain variable region sequence
(DNA)
(SEQ ID NO: 505)
gaagtgatggtcgtggaaagcggcggtggtctggtaaagccggggggatcccttaagctttcttgcgccgcatccgg
gttcacgttctccggctatgccatgtcctgggtccgacagactcccgaaaagcgcttggaatgggtggccactatct
cctccggggggacgtacatctactaccccgacagtgtgaaaggaagatttacaatatctcgcgacaacgcaaaaaat
accttgtatcttcaaatgagctccctgcggtcagaggacactgccatgtactattgcgcccgcctgggcggcgacaa
ttactatgagtat
(amino acids)
(SEQ ID NO: 506)
EVMVVESGGGLVKPGGSLKLSCAASGETFSGYAMSWVRQTPEKRLEWVATISSGGTYIYYPDSVKGRETISRDNAKNT
LYLQMSSLRSEDTAMYYCARLGGDNYYEY
Mouse C8 heavy chain variable complementarity determining region 1 (CDR1)
sequence:
(DNA)
(SEQ ID NO: 507)
ggctatgccatgtcc
(amino acids)
(SEQ ID NO: 508)
GYAMS
Mouse C8 heavy chain variable complementarity determining region 2 (CDR2)
sequence:
(DNA)
(SEQ ID NO: 509)
actatctcctccggggggacgtacatctactaccccgacagtgtgaaagga
(amino acids)
(SEQ ID NO: 510)
TISSGGTYIYYPDSVKG
Mouse C8 heavy chain variable complementarity determining region 3 (CDR3)
sequence:
(DNA)
(SEQ ID NO: 511)
ctgggcggcgacaattactatgagtat
(amino acids)
(SEQ ID NO: 512)
LGGDNYYEY
Humanized C8 heavy chain variable region sequence from IGHV3-21*04:
(DNA)
(SEQ ID NO: 525)
gaggtgcagctggtggagtctgggggaggcctggtcaagcctggggggtccctgagactctcctgtgcagcctctgg
attcaccttcagtggctatgccatgagctgggtccgccaggctccagggaaggggctggagtgggtctcaaccatta
gtagtggcggaacctacatatactaccctgactcagtgaagggccgattcaccatctccagagacaacgccaagaac
tcactgtatctgcaaatgaacagcctgagagccgaggacacggccgtgtattactgtgcgagactgggcggcgataa
ctattatgaatattggggcaaagggaccacggtcaccgtctcctcc
(amino acids)
(SEQ ID NO: 526)
EVQLVESGGGLVKPGGSLRLSCAASGFTFSGYAMSWVRQAPGKGLEWVSTISSGGTYIYYPDSVKGRFTISRDNAKN
SLYLQMNSLRAEDTAVYYCARLGGDNYYEYWGKGTTVTVSS
Humanized C8 heavy chain variable framework region 1 (FWR1) sequence:
(DNA)
(SEQ ID NO: 527)
gaggtgcagctggtggagtctgggggaggcctggtcaagcctggggggtccctgagactctcctgtgcagcctctgg
attcaccttcagt
(amino acids)
(SEQ ID NO: 528)
EVQLVESGGGLVKPGGSLRLSCAASGFTFS
Humanized C8 heavy chain variable complementarity determining region 1 (CDR1)
sequence:
(DNA)
(SEQ ID NO: 529)
ggctatgccatgagc
(amino acids)
(SEQ ID NO: 530)
GYAMS
Humanized C8 heavy chain variable framework region 2 (FWR2) sequence:
(DNA)
(SEQ ID NO: 531)
tgggtccgccaggctccagggaaggggctggagtgggtctca
(amino acids)
(SEQ ID NO: 532)
WVRQAPGKGLEWVS
Humanized C8 heavy chain variable complementarity determining region 2 (CDR2)
sequence:
(DNA)
(SEQ ID NO: 533)
accattagtagtggcggaacctacatatactaccctgactcagtgaagggc
(amino acids)
(SEQ ID NO: 534)
TISSGGTYIYYPDSVKG
Humanized C8 heavy chain variable framework region 3 (FWR3) sequence:
(DNA)
(SEQ ID NO: 535)
cgattcaccatctccagagacaacgccaagaactcactgtatctgcaaatgaacagcctgagagccgaggacacggc
cgtgtattactgtgcgaga
(amino acids)
(SEQ ID NO: 536)
RFTISRDNAKNSLYLQMNSLRAEDTAVYYCAR
Humanized C8 heavy chain variable complementarity determining region 3 (CDR3)
sequence:
(DNA)
(SEQ ID NO: 537)
ctgggcggcgataactattatgaatat
(amino acids)
(SEQ ID NO: 538)
LGGDNYYEY
Humanized C8 IgG1 heavy chain sequence
(DNA)
(SEQ ID NO: 539)
gaggtgcagctggtggagtctgggggaggcctggtcaagcctggggggtccctgagactctcctgtgcagcctctgg
attcaccttcagtggctatgccatgagctgggtccgccaggctccagggaaggggctggagtgggtctcaaccatta
gtagtggcggaacctacatatactaccctgactcagtgaagggccgattcaccatctccagagacaacgccaagaac
tcactgtatctgcaaatgaacagcctgagagccgaggacacggccgtgtattactgtgcgagactgggcggcgataa
ctattatgaatattggggcaaagggaccacggtcaccgtctcctccgctagcaccaagggcccatcggtcttccccc
tggcaccctcctccaagagcacctctgggggcacagcggccctgggctgcctggtcaaggactacttccccgaaccg
gtgacggtgtcgtggaactcaggcgccctgaccagcggcgtgcacaccttcccggctgtcctacagtcctcaggact
ctactccctcagcagcgtggtgacagtgccctccagcagcttgggcacccagacctacatctgcaacgtgaatcaca
agcccagcaacaccaaggtggacaagaaagttgagcccaaatcttgtgacaaaactcacacatgcccaccgtgccca
gcacctgaactcctggggggaccgtcagtcttcctcttccccccaaaacccaaggacaccctcatgatctcccggac
ccctgaggtcacatgcgtggtggtggacgtgagccacgaagaccctgaggtcaagttcaactggtacgtggacggcg
tggaggtgcataatgccaagacaaagccgcgggaggagcagtacaacagcacgtaccgtgtggtcagcgtcctcacc
gtcctgcaccaggactggctgaatggcaaggagtacaagtgcaaggtctccaacaaagccctcccagcccccatcga
gaaaaccatctccaaagccaaagggcagccccgagaaccacaggtgtacaccctgcccccatcccgggaggagatga
ccaagaaccaggtcagcctgacctgcctggtcaaaggcttctatcccagcgacatcgccgtggagtgggagagcaat
gggcagccggagaacaactacaagaccacgcctcccgtgctggactccgacggctccttcttcctctacagcaagct
caccgtggacaagagcaggtggcagcaggggaacgtcttctcatgctccgtgatgcatgaggctctgcacaaccact
acacgcagaagagcctctccctgtctccgggtaaatgataa
(amino acids)
(SEQ ID NO: 540)
EVQLVESGGGLVKPGGSLRLSCAASGFTFSGYAMSWVRQAPGKGLEWVSTISSGGTYIYYPDSVKGRFTISRDNAKN
SLYLQMNSLRAEDTAVYYCARLGGDNYYEYWGKGTTVTVSSASTKGPSVFPLAPSSKSTSGGTAALGCLVKDYFPEP
VTVSWNSGALTSGVHTFPAVLQSSGLYSLSSVVTVPSSSLGTQTYICNVNHKPSNTKVDKKVEPKSCDKTHTCPPCP
APELLGGPSVFLEPPKPKDTLMISRTPEVTCVVVDVSHEDPEVKFNWYVDGVEVHNAKTKPREEQYNSTYRVVSVLT
VLHQDWLNGKEYKCKVSNKALPAPIEKTISKAKGQPREPQVYTLPPSREEMTKNQVSLTCLVKGFYPSDIAVEWESN
GQPENNYKTTPPVLDSDGSFFLYSKLTVDKSRWQQGNVESCSVMHEALHNHYTQKSLSLSPGK**
Humanized C8 IgG2 heavy chain sequence
(DNA)
(SEQ ID NO: 541)
gaggtgcagctggtggagtctgggggaggcctggtcaagcctggggggtccctgagactctcctgtgcagcctctgg
attcaccttcagtggctatgccatgagctgggtccgccaggctccagggaaggggctggagtgggtctcaaccatta
gtagtggcggaacctacatatactaccctgactcagtgaagggccgattcaccatctccagagacaacgccaagaac
tcactgtatctgcaaatgaacagcctgagagccgaggacacggccgtgtattactgtgcgagactgggcggcgataa
ctattatgaatattggggcaaagggaccacggtcaccgtctcctccgcctccaccaagggcccatcggtcttccccc
tggcgccctgctccaggagcacctccgagagcacagccgccctgggctgcctggtcaaggactacttccccgaaccg
gtgacggtgtcgtggaactcaggcgctctgaccagcggcgtgcacaccttcccagctgtcctacagtcctcaggact
ctactccctcagcagcgtggtgaccgtgccctccagcaacttcggcacccagacctacacctgcaacgtagatcaca
agcccagcaacaccaaggtggacaagacagttgagcgcaaatgttgtgtcgagtgcccaccgtgcccagcaccacct
gtggcaggaccgtcagtcttcctcttccccccaaaacccaaggacaccctcatgatctcccggacccctgaggtcac
gtgcgtggtggtggacgtgagccacgaagaccccgaggtccagttcaactggtacgtggacggcgtggaggtgcata
atgccaagacaaagccacgggaggagcagttcaacagcacgttccgtgtggtcagcgtcctcaccgttgtgcaccag
gactggctgaacggcaaggagtacaagtgcaaggtctccaacaaaggcctcccagcccccatcgagaaaaccatctc
caaaaccaaagggcagccccgagaaccacaggtgtacaccctgcccccatcccgggaggagatgaccaagaaccagg
tcagcctgacctgcctggtcaaaggcttctaccccagcgacatcgccgtggagtgggagagcaatgggcagccggag
aacaactacaagaccacacctcccatgctggactccgacggctccttcttcctctacagcaagctcaccgtggacaa
gagcaggtggcagcaggggaacgtcttctcatgctccgtgatgcatgaggctctgcacaaccactacacgcagaaga
gcctctccctgtctccgggtaaatagtaa
(amino acids)
(SEQ ID NO: 542)
EVQLVESGGGLVKPGGSLRLSCAASGFTFSGYAMSWVRQAPGKGLEWVSTISSGGTYIYYPDSVKGRFTISRDNAKN
SLYLQMNSLRAEDTAVYYCARLGGDNYYEYWGKGTTVTVSSASTKGPSVFPLAPCSRSTSESTAALGCLVKDYFPEP
VTVSWNSGALTSGVHTFPAVLQSSGLYSLSSVVTVPSSNEGTQTYTCNVDHKPSNTKVDKTVERKCCVECPPCPAPP
VAGPSVFLEPPKPKDTLMISRTPEVTCVVVDVSHEDPEVQFNWYVDGVEVHNAKTKPREEQFNSTERVVSVLTVVHQ
DWLNGKEYKCKVSNKGLPAPIEKTISKTKGQPREPQVYTLPPSREEMTKNQVSLTCLVKGFYPSDIAVEWESNGQPE
NNYKTTPPMLDSDGSFFLYSKLTVDKSRWQQGNVESCSVMHEALHNHYTQKSLSLSPGK**
Mouse C8 light chain variable region sequence
(DNA)
(SEQ ID NO: 543)
gacatcgtcattacgcagacccctgccagtcttgccgtttctctgggccagagggccactatcagttacagggcgag
taagtctgtgagtaccagcggctatagttacatgcattggaaccagcagaaaccgggacagccaccacgcctgctta
tttatctggtgtctaatcttgagtccggggtgcccgccaggttcagcggcagcggctctgggaccgacttcacactc
aacattcatccagtggaagaagaggacgctgctacatactactgtcaacacattcgggaactgaccaggagtgaa
(amino acids)
(SEQ ID NO: 544)
DIVITQTPASLAVSLGQRATISYRASKSVSTSGYSYMHWNQQKPGQPPRLLIYLVSNLESGVPARFSGSGSGTDFTL
NIHPVEEEDAATYYCQHIRELTRSE
Mouse C8 light chain variable complementarity determining region 1 (CDR1)
sequence:
(DNA)
(SEQ ID NO: 545)
agggcgagtaagtctgtgagtaccagcggctatagttacatgcat
(amino acids)
(SEQ ID NO: 546)
RASKSVSTSGYSYMH
Mouse C8 light chain variable complementarity determining region 2 (CDR2)
sequence:
(DNA)
(SEQ ID NO: 547)
ctggtgtctaatcttgagtcc
(amino acids)
(SEQ ID NO: 548)
LVSNLES
Mouse C8 light chain variable complementarity determining region 3 (CDR3)
sequence:
(DNA)
(SEQ ID NO: 549)
caacacattcgggaactgaccaggagtgaa
(amino acids)
(SEQ ID NO: 550)
QHIRELTRSE
Humanized C8 light chain variable region sequence from NCBI germline z00023:
(DNA)
(SEQ ID NO: 565)
gacatcgtgatgacccagtctccagactccctggctgtgtctctgggcgagagggccaccatcaactgcagggccag
caagagtgttagcaccagcggctacagctacatgcactggtaccagcagaaaccaggacagcctcctaagctgctca
tttacctggtgtctaacctggaatccggggtccctgaccgattcagtggcagcgggtctgggacagatttcactctc
accatcagcagcctgcaggctgaagatgtggcagtttattactgtcaacacattcgggaactgaccaggagtgaatt
cggcggagggaccaaggtggagatcaaacgaact
(amino acids)
(SEQ ID NO: 566)
DIVMTQSPDSLAVSLGERATINCRASKSVSTSGYSYMHWYQQKPGQPPKLLIYLVSNLESGVPDRFSGSGSGTDFTL
TISSLQAEDVAVYYCQHIRELTRSEFGGGTKVEIKRT
Humanized C8 light chain variable framework region 1 (FWR1) sequence:
(DNA)
(SEQ ID NO: 567)
gacatcgtgatgacccagtctccagactccctggctgtgtctctgggcgagagggccaccatcaactgc
(amino acids)
(SEQ ID NO: 568)
DIVMTQSPDSLAVSLGERATINC
Humanized C8 light chain variable complementarity determining region 1 (CDR1)
sequence:
(DNA)
(SEQ ID NO: 569)
agggccagcaagagtgttagcaccagcggctacagctacatg
(amino acids)
(SEQ ID NO: 570)
RASKSVSTSGYSYM
Humanized C8 light chain variable framework region 2 (FWR2) sequence:
(DNA)
(SEQ ID NO: 571)
cactggtaccagcagaaaccaggacagcctcctaagctgctcatttac
(amino acids)
(SEQ ID NO: 572)
HWYQQKPGQPPKLLIY
Humanized C8 light chain variable complementarity determining region 2 (CDR2)
sequence:
(DNA)
(SEQ ID NO: 573)
ctggtgtctaacctggaatcc
(amino acids)
(SEQ ID NO: 574)
LVSNLES
Humanized C8 light chain variable framework region 3 (FWR3) sequence:
(DNA)
(SEQ ID NO: 575)
ggggtccctgaccgattcagtggcagcgggtctgggacagatttcactctcaccatcagcagcctgcaggctgaaga
tgtggcagtttattactgt
(amino acids)
(SEQ ID NO: 576)
GVPDRFSGSGSGTDFTLTISSLQAEDVAVYYC
Humanized C8 light chain variable complementarity determining region 3 (CDR3)
sequence:
(DNA)
(SEQ ID NO: 577)
caacacattcgggaactgaccaggagtgaa
(amino acids)
(SEQ ID NO: 578)
QHIRELTRSE
Humanized C8 Lambda light chain sequence
(DNA)
(SEQ ID NO: 579)
gacatcgtgatgacccagtctccagactccctggctgtgtctctgggcgagagggccaccatcaactgcagggccag
caagagtgttagcaccagcggctacagctacatgcactggtaccagcagaaaccaggacagcctcctaagctgctca
tttacctggtgtctaacctggaatccggggtccctgaccgattcagtggcagcgggtctgggacagatttcactctc
accatcagcagcctgcaggctgaagatgtggcagtttattactgtcaacacattcgggaactgaccaggagtgaatt
cggcggagggaccaaggtggagatcaaacgaactggtcagcccaaggctgccccctcggtcactctgttcccgccct
cctctgaggagcttcaagccaacaaggccacactggtgtgtctcataagtgacttctacccgggagccgtgacagtg
gcctggaaggcagatagcagccccgtcaaggcgggagtggagaccaccacaccctccaaacaaagcaacaacaagta
cgcggccagcagctatctgagcctgacgcctgagcagtggaagtcccacagaagctacagctgccaggtcacgcatg
aagggagcaccgtggagaagacagtggcccctacagaatgttcatagtaa
(amino acids)
(SEQ ID NO: 580)
DIVMTQSPDSLAVSLGERATINCRASKSVSTSGYSYMHWYQQKPGQPPKLLIYLVSNLESGVPDRFSGSGSGTDFTL
TISSLQAEDVAVYYCQHIRELTRSEFGGGTKVEIKRTGQPKAAPSVTLEPPSSEELQANKATLVCLISDFYPGAVTV
AWKADSSPVKAGVETTTPSKQSNNKYAASSYLSLTPEQWKSHRSYSCQVTHEGSTVEKTVAPTECS**
Humanized C8 Kappa light chain sequence
(DNA)
(SEQ ID NO: 581)
gacatcgtgatgacccagtctccagactccctggctgtgtctctgggcgagagggccaccatcaactgcagggccag
caagagtgttagcaccagcggctacagctacatgcactggtaccagcagaaaccaggacagcctcctaagctgctca
tttacctggtgtctaacctggaatccggggtccctgaccgattcagtggcagcgggtctgggacagatttcactctc
accatcagcagcctgcaggctgaagatgtggcagtttattactgtcaacacattcgggaactgaccaggagtgaatt
cggcggagggaccaaggtggagatcaaacgaactacggtggctgcaccatctgtcttcatcttcccgccatctgatg
agcagttgaaatctggaactgcctctgttgtgtgcctgctgaataacttctatcccagagaggccaaagtacagtgg
aaggtggataacgccctccaatcgggtaactcccaggagagtgtcacagagcaggacagcaaggacagcacctacag
cctcagcagcaccctgacgctgagcaaagcagactacgagaaacacaaagtctacgcctgcgaagtcacccatcagg
gcctgagctcgcccgtcacaaagagcttcaacaggggagagtgttagtaa
(amino acids)
(SEQ ID NO: 582)
DIVMTQSPDSLAVSLGERATINCRASKSVSTSGYSYMHWYQQKPGQPPKLLIYLVSNLESGVPDRFSGSGSGTDFTL
TISSLQAEDVAVYYCQHIRELTRSEFGGGTKVEIKRTTVAAPSVFIFPPSDEQLKSGTASVVCLLNNEYPREAKVQW
KVDNALQSGNSQESVTEQDSKDSTYSLSSTLTLSKADYEKHKVYACEVTHQGLSSPVTKSENRGEC**
CAR-T E6 CD8 sequence:
(DNA)
(SEQ ID NO: 584)
gaggtccagctggttgagagtggcggtgggctggttaagcctggcggctccctgcggctgagctgcgccgcgagtgg
atttactttcagccgatatgggatgagttgggtgcggcaagctcccgggaagaggctggaatgggtctcaacaatct
ccggggggggcacttacatctattaccccgactcagtcaaggggagatttaccatttcacgagacaacgctaagaat
accctgtatttgcagatgaattctctgagagcagaggacacagctgtttactattgtacccgcgacaactatggcag
gaactacgactacggtatggactattggggacaagggacattggttacagtgagcagtggcggcgggggcagcggag
gaggaggcagcggtggggggggcagcgagatagtgctcacgcagtcacccgcgactctcagtctctcacctggggaa
cgagctaccctgacgtgctctgctacctcctcagtgtcatatattcactggtatcagcaacggcccgggcagtcccc
tagattgctcatttatagtacctctaatctggcctcaggtatccctgcacgattttctggatctggttcaggttctg
attacaccctcactatctctagcctggagcctgaagactttgccgtttattactgccagcagaggtctagctcccca
ttcacctttgggagtgggaccaaggttgaaattaaaacgacaaccccggcccccagaccaccaacgccagcccccac
catcgccagccaacccctgtctctgagaccagaagcctgtaggcctgccgccggtggagctgtgcacacaagaggac
tggatttcgcctgtgatatctacatttgggccccgctcgcaggcacatgtggagtgctcctcctctccctggtgatt
accctgtactgctgataa
(amino acids)
(SEQ ID NO: 585)
EVQLVESGGGLVKPGGSLRLSCAASGFTFSRYGMSWVRQAPGKRLEWVSTISGGGTYIYYPDSVKGRFTISRDNAKN
TLYLQMNSLRAEDTAVYYCTRDNYGRNYDYGMDYWGQGTLVTVSSGGGGSGGGGSGGGGSEIVLTQSPATLSLSPGE
RATLTCSATSSVSYIHWYQQRPGQSPRLLIYSTSNLASGIPARFSGSGSGSDYTLTISSLEPEDFAVYYCQQRSSSP
FTEGSGTKVEIKTTTPAPRPPTPAPTIASQPLSLRPEACRPAAGGAVHTRGLDFACDIYIWAPLAGTCGVLLLSLVI
TLYC**
CAR-T C2 CD8 CD8 sequence:
N-CD81s-huMNC2scFv-CD8ecd fragment- CDB transmembrane-C
(DNA)
(SEQ ID NO: 586)
gaagtgcagctcgtagagagtggcgggggactggtgaagcccggtggaagcctcagactcagttgcgccgcctcagg
tttcactttttcaggttacgccatgtcctgggtaagacaggcaccggggaaaggactcgagtgggtgtctactatca
gctcaggaggcacttatatatattatcctgactctgtaaaaggccgatttacgatttctcgcgacaatgcaaagaac
tccctctacctccaaatgaacagtcttagggcagaagacactgctgtatactattgtgcacgcctcggcggcgacaa
ctactacgagtactttgacgtgtgggggaaagggactaccgtgacagtttcaagcggaggaggtggctcaggtggag
gcgggtcaggggggggaggaagtgatattgtgctcacacaatccccagcctccctggctgtgtctcccggccaacgc
gctacaattacatgtcgggcctccaaaagcgtgagcaccagcggctacagctacatgcactggtatcaacagaaacc
aggacaaccccccaaactgttgatttatctcgcttcaaacttggagtccggcgtgcctgcgcgcttttcagggagtg
ggagcggcacagattttacgctgactatcaaccccgtagaagcaaacgatacagcgaattattattgtcaacattcc
cgggaactcccctttacgttcggcgggggcacaaaggtcgaaattaagagaaccacgacaaccccggcccccagacc
accaacgccagcccccaccatcgccagccaacccctgtctctgagaccagaagcctgtaggcctgccgccggtggag
ctgtgcacacaagaggactggatttcgcctgtgatatctacatttgggccccgctcgcaggcacatgtggagtgctc
ctcctctccctggtgattaccctgtactgctgataa
(amino acids)
(SEQ ID NO: 587)
EVQLVESGGGLVKPGGSLRLSCAASGFTFSGYAMSWVRQAPGKGLEWVSTISSGGTYIYYPDSVKGRFTISRDNAKN
SLYLQMNSLRAEDTAVYYCARLGGDNYYEYFDVWGKGTTVTVSSGGGGSGGGGSGGGGSDIVLTQSPASLAVSPGQR
ATITCRASKSVSTSGYSYMHWYQQKPGQPPKLLIYLASNLESGVPARFSGSGSGTDFTLTINPVEANDTANYYCQHS
RELPFTEGGGTKVEIKRTTTTPAPRPPTPAPTIASQPLSLRPEACRPAAGGAVHTRGLDFACDIYIWAPLAGTCGVL
LLSLVITLYC**
CD8/4-1BB sequence
N- CD8 transmembrane- 4-1BB-C
(DNA)
(SEQ ID NO: 588)
acgacaaccccggcccccagaccaccaacgccagcccccaccatcgccagccaacccctgtctctgagaccagaagc
ctgtaggcctgccgccggtggagctgtgcacacaagaggactggatttcgcctgtgatatctacatttgggccccgc
tcgcaggcacatgtggagtgctcctcctctccctggtgattaccctgtactgcaaaaggggccgcaaaaaactcctt
tacatttttaagcagccttttatgaggccagtacagacgactcaagaggaagacgggtgctcatgccgctttcctga
ggaggaggaaggagggtgcgaactgtgataa
(amino acids)
(SEQ ID NO: 589)
TTTPAPRPPTPAPTIASQPLSLRPEACRPAAGGAVHTRGLDFACDIYIWAPLAGTCGVLLLSLVITLYCKRGRKKLL
YIFKQPFMRPVQTTQEEDGCSCRFPEEEEGGCEL**
CD8/CD28 sequence
N- CD8 transmembrane-CD28-C
(DNA)
(SEQ ID NO: 590)
acgacaaccccggcccccagaccaccaacgccagcccccaccatcgccagccaacccctgtctctgagaccagaagc
ctgtaggcctgccgccggtggagctgtgcacacaagaggactggatttcgcctgtgatatctacatttgggccccgc
tcgcaggcacatgtggagtgctcctcctctccctggtgattaccctgtactgcagaagcaagcggtctcggctcctg
cattctgattacatgaacatgaccccaagaagaccaggccccaccaggaaacattaccagccctacgctccgccacg
cgacttcgctgcctaccggtcctgataa
(amino acids)
(SEQ ID NO: 591)
TTTPAPRPPTPAPTIASQPLSLRPEACRPAAGGAVHTRGLDFACDIYIWAPLAGTCGVLLLSLVITLYCRSKRSRLL
HSDYMNMTPRRPGPTRKHYQPYAPPRDFAAYRS**
CD8/CD3z sequence:
N- CDB transmembrane-CD3zeta-C
(DNA)
(SEQ ID NO: 592)
acgacaaccccggcccccagaccaccaacgccagcccccaccatcgccagccaacccctgtctctgagaccagaagc
ctgtaggcctgccgccggtggagctgtgcacacaagaggactggatttcgcctgtgatatctacatttgggccccgc
tcgcaggcacatgtggagtgctcctcctctccctggtgattaccctgtactgccgcgttaagttctcccgatcagcc
gacgcgcctgcttacaagcagggccagaaccaactgtacaacgagctgaatctcggtagacgggaagagtacgacgt
gttggacaaacggagaggccgcgacccagaaatgggcggcaagcctcgcaggaaaaacccccaggagggactgtaca
atgagttgcagaaagataagatggcagaagcttatagcgagatcggaatgaagggggaaaggagacgagggaaagga
cacgacggcctttatcagggcctgtccacagcaacaaaagatacgtatgacgccctccatatgcaggcacttccacc
acggtgataa
(amino acids)
(SEQ ID NO: 593)
TTTPAPRPPTPAPTIASQPLSLRPEACRPAAGGAVHTRGLDFACDIYIWAPLAGTCGVLLLSLVITLYCRVKFSRSA
DAPAYKQGQNQLYNELNLGRREEYDVLDKRRGRDPEMGGKPRRKNPQEGLYNELQKDKMAEAYSEIGMKGERRRGKG
HDGLYQGLSTATKDTYDALHMQALPPR**
CD8/CD28/CD3z sequence:
N- CDB transmembrane- CD28- CD3zeta-C
(DNA)
(SEQ ID NO: 594)
acgacaaccccggcccccagaccaccaacgccagcccccaccatcgccagccaacccctgtctctgagaccagaagc
ctgtaggcctgccgccggtggagctgtgcacacaagaggactggatttcgcctgtgatatctacatttgggccccgc
tcgcaggcacatgtggagtgctcctcctctccctggtgattaccctgtactgcagaagcaagcggtctcggctcctg
cattctgattacatgaacatgaccccaagaagaccaggccccaccaggaaacattaccagccctacgctccgccacg
cgacttcgctgcctaccggtcccgcgttaagttctcccgatcagccgacgcgcctgcttacaagcagggccagaacc
aactgtacaacgagctgaatctcggtagacgggaagagtacgacgtgttggacaaacggagaggccgcgacccagaa
atgggcggcaagcctcgcaggaaaaacccccaggagggactgtacaatgagttgcagaaagataagatggcagaagc
ttatagcgagatcggaatgaagggggaaaggagacgagggaaaggacacgacggcctttatcagggcctgtccacag
caacaaaagatacgtatgacgccctccatatgcaggcacttccaccacggtgataa
(amino acids)
(SEQ ID NO: 595)
TTTPAPRPPTPAPTIASQPLSLRPEACRPAAGGAVHTRGLDFACDIYIWAPLAGTCGVLLLSLVITLYCRSKRSRLL
HSDYMNMTPRRPGPTRKHYQPYAPPRDFAAYRSRVKFSRSADAPAYKQGQNQLYNELNLGRREEYDVLDKRRGRDPE
MGGKPRRKNPQEGLYNELQKDKMAEAYSEIGMKGERRRGKGHDGLYQGLSTATKDTYDALHMQALPPR**
CD8/4-1BB/CD3z sequence:
N- CDB transmembrane- 4-1BB- CD3zeta-C
(DNA)
(SEQ ID NO: 596)
acgacaaccccggcccccagaccaccaacgccagcccccaccatcgccagccaacccctgtctctgagaccagaagc
ctgtaggcctgccgccggtggagctgtgcacacaagaggactggatttcgcctgtgatatctacatttgggccccgc
tcgcaggcacatgtggagtgctcctcctctccctggtgattaccctgtactgcaaaaggggccgcaaaaaactcctt
tacatttttaagcagccttttatgaggccagtacagacgactcaagaggaagacgggtgctcatgccgctttcctga
ggaggaggaaggagggtgcgaactgcgcgttaagttctcccgatcagccgacgcgcctgcttacaagcagggccaga
accaactgtacaacgagctgaatctcggtagacgggaagagtacgacgtgttggacaaacggagaggccgcgaccca
gaaatgggcggcaagcctcgcaggaaaaacccccaggagggactgtacaatgagttgcagaaagataagatggcaga
agcttatagcgagatcggaatgaagggggaaaggagacgagggaaaggacacgacggcctttatcagggcctgtcca
cagcaacaaaagatacgtatgacgccctccatatgcaggcacttccaccacggtgataa
(amino acids)
(SEQ ID NO: 597)
TTTPAPRPPTPAPTIASQPLSLRPEACRPAAGGAVHTRGLDFACDIYIWAPLAGTCGVLLLSLVITLYCKRGRKKLL
YIFKQPFMRPVQTTQEEDGCSCRFPEEEEGGCELRVKFSRSADAPAYKQGQNQLYNELNLGRREEYDVLDKRRGRDP
EMGGKPRRKNPQEGLYNELQKDKMAEAYSEIGMKGERRRGKGHDGLYQGLSTATKDTYDALHMQALPPR**
CD8/CD28/4-1BB/CD3z sequence:
N- CDB transmembrane-CD28- 4-1BB-CD3zeta-C
(DNA)
(SEQ ID NO: 598)
acgacaaccccggcccccagaccaccaacgccagcccccaccatcgccagccaacccctgtctctgagaccagaagc
ctgtaggcctgccgccggtggagctgtgcacacaagaggactggatttcgcctgtgatatctacatttgggccccgc
tcgcaggcacatgtggagtgctcctcctctccctggtgattaccctgtactgcagaagcaagcggtctcggctcctg
cattctgattacatgaacatgaccccaagaagaccaggccccaccaggaaacattaccagccctacgctccgccacg
cgacttcgctgcctaccggtccaaaaggggccgcaaaaaactcctttacatttttaagcagccttttatgaggccag
tacagacgactcaagaggaagacgggtgctcatgccgctttcctgaggaggaggaaggagggtgcgaactgcgcgtt
aagttctcccgatcagccgacgcgcctgcttacaagcagggccagaaccaactgtacaacgagctgaatctcggtag
acgggaagagtacgacgtgttggacaaacggagaggccgcgacccagaaatgggcggcaagcctcgcaggaaaaacc
cccaggagggactgtacaatgagttgcagaaagataagatggcagaagcttatagcgagatcggaatgaagggggaa
aggagacgagggaaaggacacgacggcctttatcagggcctgtccacagcaacaaaagatacgtatgacgccctcca
tatgcaggcacttccaccacggtgataa
(amino acids)
(SEQ ID NO: 599)
TTTPAPRPPTPAPTIASQPLSLRPEACRPAAGGAVHTRGLDFACDIYIWAPLAGTCGVLLLSLVITLYCRSKRSRLL
HSDYMNMTPRRPGPTRKHYQPYAPPRDFAAYRSKRGRKKLLYIFKQPFMRPVQTTQEEDGCSCRFPEEEEGGCELRV
KFSRSADAPAYKQGQNQLYNELNLGRREEYDVLDKRRGRDPEMGGKPRRKNPQEGLYNELQKDKMAEAYSEIGMKGE
RRRGKGHDGLYQGLSTATKDTYDALHMQALPPR**
CAR-T C2 CD8/CD8/CD28/CD3z sequence:
N-CD81s-huMNC2scFv-CD8ecd fragment- CDB transmembrane- CD28- CD3zeta-C
(DNA)
(SEQ ID NO: 608)
atggccttgccagtgacggccctgctgctgccattggctcttctgttgcacgctgccaggcctgaagtgcagctcgt
agagagtggcgggggactggtgaagcccggtggaagcctcagactcagttgcgccgcctcaggtttcactttttcag
gttacgccatgtcctgggtaagacaggcaccggggaaaggactcgagtgggtgtctactatcagctcaggaggcact
tatatatattatcctgactctgtaaaaggccgatttacgatttctcgcgacaatgcaaagaactccctctacctcca
aatgaacagtcttagggcagaagacactgctgtatactattgtgcacgcctcggcggcgacaactactacgagtact
ttgacgtgtgggggaaagggactaccgtgacagtttcaagcggaggaggtggctcaggtggaggcgggtcagggggg
ggaggaagtgatattgtgctcacacaatccccagcctccctggctgtgtctcccggccaacgcgctacaattacatg
tcgggcctccaaaagcgtgagcaccagcggctacagctacatgcactggtatcaacagaaaccaggacaacccccca
aactgttgatttatctcgcttcaaacttggagtccggcgtgcctgcgcgcttttcagggagtgggagcggcacagat
tttacgctgactatcaaccccgtagaagcaaacgatacagcgaattattattgtcaacattcccgggaactcccctt
tacgttcggcgggggcacaaaggtcgaaattaagagaaccacgacaaccccggcccccagaccaccaacgccagccc
ccaccatcgccagccaacccctgtctctgagaccagaagcctgtaggcctgccgccggtggagctgtgcacacaaga
ggactggatttcgcctgtgatatctacatttgggccccgctcgcaggcacatgtggagtgctcctcctctccctggt
gattaccctgtactgcagaagcaagcggtctcggctcctgcattctgattacatgaacatgaccccaagaagaccag
gccccaccaggaaacattaccagccctacgctccgccacgcgacttcgctgcctaccggtcccgcgttaagttctcc
cgatcagccgacgcgcctgcttacaagcagggccagaaccaactgtacaacgagctgaatctcggtagacgggaaga
gtacgacgtgttggacaaacggagaggccgcgacccagaaatgggcggcaagcctcgcaggaaaaacccccaggagg
gactgtacaatgagttgcagaaagataagatggcagaagcttatagcgagatcggaatgaagggggaaaggagacga
gggaaaggacacgacggcctttatcagggcctgtccacagcaacaaaagatacgtatgacgccctccatatgcaggc
acttccaccacggtgataa
(amino acids)
(SEQ ID NO: 609)
MALPVTALLLPLALLLHAARPEVQLVESGGGLVKPGGSLRLSCAASGFTFSGYAMSWVRQAPGKGLEWVSTISSGGT
YIYYPDSVKGRFTISRDNAKNSLYLQMNSLRAEDTAVYYCARLGGDNYYEYFDVWGKGTTVTVSSGGGGSGGGGSGG
GGSDIVLTQSPASLAVSPGQRATITCRASKSVSTSGYSYMHWYQQKPGQPPKLLIYLASNLESGVPARFSGSGSGTD
FTLTINPVEANDTANYYCQHSRELPFTEGGGTKVEIKRTTTTPAPRPPTPAPTIASQPLSLRPEACRPAAGGAVHTR
GLDFACDIYIWAPLAGTCGVLLLSLVITLYCRSKRSRLLHSDYMNMTPRRPGPTRKHYQPYAPPRDFAAYRSRVKFS
RSADAPAYKQGQNQLYNELNLGRREEYDVLDKRRGRDPEMGGKPRRKNPQEGLYNELQKDKMAEAYSEIGMKGERRR
GKGHDGLYQGLSTATKDTYDALHMQALPPR**
CAR-T C2 CD8/CD8/4-1BB/CD3z sequence #13:
N-CD81s-huMNC2scFv-CD8ecd fragment- CDB transmembrane- 4-1BB- CD3zeta-C
(DNA)
(SEQ ID NO: 610)
atggccttgccagtgacggccctgctgctgccattggctcttctgttgcacgctgccaggcctgaagtgcagctcgt
agagagtggcgggggactggtgaagcccggtggaagcctcagactcagttgcgccgcctcaggtttcactttttcag
gttacgccatgtcctgggtaagacaggcaccggggaaaggactcgagtgggtgtctactatcagctcaggaggcact
tatatatattatcctgactctgtaaaaggccgatttacgatttctcgcgacaatgcaaagaactccctctacctcca
aatgaacagtcttagggcagaagacactgctgtatactattgtgcacgcctcggcggcgacaactactacgagtact
ttgacgtgtgggggaaagggactaccgtgacagtttcaagcggaggaggtggctcaggtggaggcgggtcagggggg
ggaggaagtgatattgtgctcacacaatccccagcctccctggctgtgtctcccggccaacgcgctacaattacatg
tcgggcctccaaaagcgtgagcaccagcggctacagctacatgcactggtatcaacagaaaccaggacaacccccca
aactgttgatttatctcgcttcaaacttggagtccggcgtgcctgcgcgcttttcagggagtgggagcggcacagat
tttacgctgactatcaaccccgtagaagcaaacgatacagcgaattattattgtcaacattcccgggaactcccctt
tacgttcggcgggggcacaaaggtcgaaattaagagaaccacgacaaccccggcccccagaccaccaacgccagccc
ccaccatcgccagccaacccctgtctctgagaccagaagcctgtaggcctgccgccggtggagctgtgcacacaaga
ggactggatttcgcctgtgatatctacatttgggccccgctcgcaggcacatgtggagtgctcctcctctccctggt
gattaccctgtactgcaaaaggggccgcaaaaaactcctttacatttttaagcagccttttatgaggccagtacaga
cgactcaagaggaagacgggtgctcatgccgctttcctgaggaggaggaaggagggtgcgaactgcgcgttaagttc
tcccgatcagccgacgcgcctgcttacaagcagggccagaaccaactgtacaacgagctgaatctcggtagacggga
agagtacgacgtgttggacaaacggagaggccgcgacccagaaatgggcggcaagcctcgcaggaaaaacccccagg
agggactgtacaatgagttgcagaaagataagatggcagaagcttatagcgagatcggaatgaagggggaaaggaga
cgagggaaaggacacgacggcctttatcagggcctgtccacagcaacaaaagatacgtatgacgccctccatatgca
ggcacttccaccacggtgataa
(amino acids)
(SEQ ID NO: 611)
MALPVTALLLPLALLLHAARPEVQLVESGGGLVKPGGSLRLSCAASGFTFSGYAMSWVRQAPGKGLEWVSTISSGGT
YIYYPDSVKGRFTISRDNAKNSLYLQMNSLRAEDTAVYYCARLGGDNYYEYEDVWGKGTTVTVSSGGGGSGGGGSGG
GGSDIVLTQSPASLAVSPGQRATITCRASKSVSTSGYSYMHWYQQKPGQPPKLLIYLASNLESGVPARFSGSGSGTD
FTLTINPVEANDTANYYCQHSRELPFTEGGGTKVEIKRTTTTPAPRPPTPAPTIASQPLSLRPEACRPAAGGAVHTR
GLDFACDIYIWAPLAGTCGVLLLSLVITLYCKRGRKKLLYIFKQPFMRPVQTTQEEDGCSCREPEEEEGGCELRVKF
SRSADAPAYKQGQNQLYNELNLGRREEYDVLDKRRGRDPEMGGKPRRKNPQEGLYNELQKDKMAEAYSEIGMKGERR
RGKGHDGLYQGLSTATKDTYDALHMQALPPR**
MUC1 truncated extra cellular domain sequence
(amino acids)
(SEQ ID NO: 620)
SNIKFRPGSVVVQLTLAFREGTINVHDVETQFNQYKTEAASRY
MUC1 truncated extra cellular domain sequence
(amino acids)
(SEQ ID NO: 621)
SVVVQLTLAFREGTINVHDVETQFNQYKTEAASRY
MUC1 truncated extra cellular domain sequence
(amino acids)
(SEQ ID NO: 622)
VQLTLAFREGTINVHDVETQFNQY
MUC1 truncated extra cellular domain sequence
(amino acids)
(SEQ ID NO: 623)
SNIKFRPGSVVVQLTLAFREGTIN
Primers
(SEQ ID NO: 624)
attctaagcttgggccaccatggaactg
(SEQ ID NO: 625)
tctagagtttaaacttactatttacccggagacagggagag
(SEQ ID NO: 626)
agtatggcccagccggccgaggtgcagctggtggagtctgg
(SEQ ID NO: 627)
tagaaggcacagtcgaggctgatcag
(SEQ ID NO: 628)
attctaagcttgggccaccatggaagc
(SEQ ID NO: 629)
tctagagtttaaacttactaacactctcccctgttgaagc
(SEQ ID NO: 630)
agtatggcccagccggccgaaattgtgttgacacagtctccag
(SEQ ID NO: 631)
tagaaggcacagtcgaggctgatcag
(SEQ ID NO: 632)
actgtcatatggaggtgcagctggtggagtctg
(SEQ ID NO: 633)
actgtctcgagtttaatttccactttggtgccgctgc
(SEQ ID NO: 634)
actgtcatatggaggtgcagctggtggagtctg
(SEQ ID NO: 635)
actgtaccggttttaatttccactttggtgccgctgc
(SEQ ID NO: 636)
cttcttcctcaggagcaagctcaccgtgg
(SEQ ID NO: 637)
gagccgtcggagtccagc
(SEQ ID NO: 638)
gcacctgaactcctgggg
(SEQ ID NO: 639)
tttaatttccactttggtgccg
(SEQ ID NO: 640)
cgcggctagcttaagcttggtaccgagggcca
(SEQ ID NO: 641)
cgcggcggccgcctgatcagcgggtttaaacttatc
MMP9
(DNA
(SEQ ID NO: 642)
atgagcctctggcagcccctggtcctggtgctcctggtgctgggctgctgctttgctgcccccagacagcgccagtc
cacccttgtgctcttccctggagacctgagaaccaatctcaccgacaggcagctggcagaggaatacctgtaccgct
atggttacactcgggtggcagagatgcgtggagagtcgaaatctctggggcctgcgctgctgcttctccagaagcaa
ctgtccctgcccgagaccggtgagctggatagcgccacgctgaaggccatgcgaaccccacggtgcggggtcccaga
cctgggcagattccaaacctttgagggcgacctcaagtggcaccaccacaacatcacctattggatccaaaactact
cggaagacttgccgcgggcggtgattgacgacgcctttgcccgcgccttcgcactgtggagcgcggtgacgccgctc
accttcactcgcgtgtacagccgggacgcagacatcgtcatccagtttggtgtcgcggagcacggagacgggtatcc
cttcgacgggaaggacgggctcctggcacacgcctttcctcctggccccggcattcagggagacgcccatttcgacg
atgacgagttgtggtccctgggcaagggcgtcgtggttccaactcggtttggaaacgcagatggcgcggcctgccac
ttccccttcatcttcgagggccgctcctactctgcctgcaccaccgacggtcgctccgacggcttgccctggtgcag
taccacggccaactacgacaccgacgaccggtttggcttctgccccagcgagagactctacacccaggacggcaatg
ctgatgggaaaccctgccagtttccattcatcttccaaggccaatcctactccgcctgcaccacggacggtcgctcc
gacggctaccgctggtgcgccaccaccgccaactacgaccgggacaagctcttcggcttctgcccgacccgagctga
ctcgacggtgatggggggcaactcggcgggggagctgtgcgtcttccccttcactttcctgggtaaggagtactcga
cctgtaccagcgagggccgcggagatgggcgcctctggtgcgctaccacctcgaactttgacagcgacaagaagtgg
ggcttctgcccggaccaaggatacagtttgttcctcgtggcggcgcatgagttcggccacgcgctgggcttagatca
ttcctcagtgccggaggcgctcatgtaccctatgtaccgcttcactgaggggccccccttgcataaggacgacgtga
atggcatccggcacctctatggtcctcgccctgaacctgagccacggcctccaaccaccaccacaccgcagcccacg
gctcccccgacggtctgccccaccggaccccccactgtccacccctcagagcgccccacagctggccccacaggtcc
cccctcagctggccccacaggtccccccactgctggcccttctacggccactactgtgcctttgagtccggtggacg
atgcctgcaacgtgaacatcttcgacgccatcgcggagattgggaaccagctgtatttgttcaaggatgggaagtac
tggcgattctctgagggcagggggagccggccgcagggccccttccttatcgccgacaagtggcccgcgctgccccg
caagctggactcggtctttgaggagcggctctccaagaagcttttcttcttctctgggcgccaggtgtgggtgtaca
caggcgcgtcggtgctgggcccgaggcgtctggacaagctgggcctgggagccgacgtggcccaggtgaccggggcc
ctccggagtggcagggggaagatgctgctgttcagcgggcggcgcctctggaggttcgacgtgaaggcgcagatggt
ggatccccggagcgccagcgaggtggaccggatgttccccggggtgcctttggacacgcacgacgtcttccagtacc
gagagaaagcctatttctgccaggaccgcttctactggcgcgtgagttcccggagtgagttgaaccaggtggaccaa
gtgggctacgtgacctatgacatcctgcagtgccctgaggacgattacaaggatgacgacgataagtgataa
(amino acids)
(SEQ ID NO: 643)
MSLWQPLVLVLLVLGCCFAAPRQRQSTLVLFPGDLRTNLTDRQLAEEYLYRYGYTRVAEMRGESKSLGPALLLLQKQ
LSLPETGELDSATLKAMRTPRCGVPDLGRFQTFEGDLKWHHHNITYWIQNYSEDLPRAVIDDAFARAFALWSAVTPL
TFTRVYSRDADIVIQFGVAEHGDGYPFDGKDGLLAHAFPPGPGIQGDAHFDDDELWSLGKGVVVPTRFGNADGAACH
FPFIFEGRSYSACTTDGRSDGLPWCSTTANYDTDDRFGFCPSERLYTQDGNADGKPCQFPFIFQGQSYSACTTDGRS
DGYRWCATTANYDRDKLFGFCPTRADSTVMGGNSAGELCVFPFTFLGKEYSTCTSEGRGDGRLWCATTSNFDSDKKW
GFCPDQGYSLFLVAAHEFGHALGLDHSSVPEALMYPMYRFTEGPPLHKDDVNGIRHLYGPRPEPEPRPPTTTTPQPT
APPTVCPTGPPTVHPSERPTAGPTGPPSAGPTGPPTAGPSTATTVPLSPVDDACNVNIFDAIAEIGNQLYLFKDGKY
WRFSEGRGSRPQGPFLIADKWPALPRKLDSVFEERLSKKLFFFSGRQVWVYTGASVLGPRRLDKLGLGADVAQVTGA
LRSGRGKMLLFSGRRLWRFDVKAQMVDPRSASEVDRMFPGVPLDTHDVFQYREKAYFCQDRFYWRVSSRSELNQVDQ
VGYVTYDILQCPEDDYKDDDDK**
MMP9 catalytic domain
(DNA)
(SEQ ID NO: 644)
atgttccaaacctttgagggcgacctcaagtggcaccaccacaacatcacctattggatccaaaactactcggaaga
cttgccgcgggcggtgattgacgacgcctttgcccgcgccttcgcactgtggagcgcggtgacgccgctcaccttca
ctcgcgtgtacagccgggacgcagacatcgtcatccagtttggtgtcgcggagcacggagacgggtatcccttcgac
gggaaggacgggctcctggcacacgcctttcctcctggccccggcattcagggagacgcccatttcgacgatgacga
gttgtggtccctgggcaagggcgtcgtggttccaactcggtttggaaacgcagatggcgcggcctgccacttcccct
tcatcttcgagggccgctcctactctgcctgcaccaccgacggtcgctccgacggcttgccctggtgcagtaccacg
gccaactacgacaccgacgaccggtttggcttctgccccagcgagagactctacacccaggacggcaatgctgatgg
gaaaccctgccagtttccattcatcttccaaggccaatcctactccgcctgcaccacggacggtcgctccgacggct
accgctggtgcgccaccaccgccaactacgaccgggacaagctcttcggcttctgcccgacccgagctgactcgacg
gtgatggggggcaactcggcgggggagctgtgcgtcttccccttcactttcctgggtaaggagtactcgacctgtac
cagcgagggccgcggagatgggcgcctctggtgcgctaccacctcgaactttgacagcgacaagaagtggggcttct
gcccggaccaaggatacagtttgttcctcgtggcggcgcatgagttcggccacgcgctgggcttagatcattcctca
gtgccggaggcgctcatgtaccctatgtaccgcttcactgaggggccccccttgcataaggacgacgtgaatggcat
ccggcacctctatggtcctcgccctgaacctgattacaaggatgacgacgataagtgataa
(amino acids)
(SEQ ID NO: 645)
MFQTFEGDLKWHHHNITYWIQNYSEDLPRAVIDDAFARAFALWSAVTPLTFTRVYSRDADIVIQFGVAEHGDGYPFD
GKDGLLAHAFPPGPGIQGDAHFDDDELWSLGKGVVVPTRFGNADGAACHFPFIFEGRSYSACTTDGRSDGLPWCSTT
ANYDTDDRFGFCPSERLYTQDGNADGKPCQFPFIFQGQSYSACTTDGRSDGYRWCATTANYDRDKLFGFCPTRADST
VMGGNSAGELCVFPFTFLGKEYSTCTSEGRGDGRLWCATTSNFDSDKKWGFCPDQGYSLFLVAAHEFGHALGLDHSS
VPEALMYPMYRFTEGPPLHKDDVNGIRHLYGPRPEPDYKDDDDK**
NFATcl Promoter (NFATc1P)
(DNA)
(SEQ ID NO: 646)
aggcaggaggaagaggaaaggggcgcagggcgctcggggagcagagccgggggcccgcggtggccgcagaggccggg
ccggggcgcagaggccgggcgagctggccgcgctctgggccgccgcctccggaactccctgcgcctggcgcgcggcc
accgtggtcccggcaacggcattaaacagagggaaacagacccgggattccgtcacccgggcggggggataaggacg
gctttgagagcagacaggaaaagggagcttttctgcatggggtgaaaaaattatttattgaaggaggaggaggcggc
agcggaggaaggggaggggcgggaggaggaggaagagccggccgcccccgccccggccccggctcctcaggagccaa
gggcagcctcgccaggtcggtcccgggctcgaggaccgcggctggggtcgaggggctcagtctcccacgtgaccggc
tgggcgcgccccgccagacccggcctcgggattccctcctcccggcgagtctccgcccgccccgtcctggaggtggg
gagaaggagggcggggcgggggggacggaaactctccccgccaaatcctggccccaggcctggggacactcgcggcg
ggaagatttggaggggaggggagggggaggggcgtgggggcgcggcctcgctggagtccccctgaccccccgacccc
cgcccaccggcctgggcgtcctcccgcggcccctcctcccctcccggcgcccggtgctctggggcgcgtgccacgcc
tggctcggcgccgtaggggcccccgcaggtagagacccctggaaatggcctcgacgccgcaggagcgaggcggccac
caccccgctaatccgggcacgtctctccaggccgaggcctgcggtggaaaagccggggttccatttgtgctgagtcg
gggcggccgaatggagccaggcctcgggacgcgggacggacgggctctggccgcgcaccttcgcgggctctgcagcg
cccgaccgcctcccccggcagggaggaggcgcttgtggggggcacccacggggcacagtgatccctgggggtctgcg
gacctcctgggccccgcagcagacacgagtttagcctttgggtttagtttaaatcacataagggtgtcgtgcaatcg
atttatggtttctacacaccagacactttaacctccaaccccccccatccaagccaacaagaaaatgcggtgccgtg
ttggcagctgagctgcgcccgaagagacgcagggagacgtaagagaggaaagtgtgagtggccggggggcctccccc
cgtcagaagtcgcgcagtcgcgcccataaaacgccccctccgggcggctagggcaggtgagcgcgtccccgggcctc
cccacgccggcccctgccacagagccgtctaggtcgagcagatatttacagaataaaaatgacaataactcgacgtc
ccgggacggccacgcaatctgttagtaatttagcgggatgggaatttcctttctagggcctgccagtgaagcgcttt
tccaaatttccacagcgggggaagcctgcgattttacataatgacttcagcatgccgggctttctcgacacccctcc
ccggcccccggcccccgccccccgccccttttccagcagggccgggctccctccggacacccgcgtggactcaggcg
tcccgtctggcccgttcgcccccgtttcccccgccagccccagcgcccccctgcccggcccccggattccccgttcc
cgcccctacgcccccatcccctccccgtgcgcccctccccgtgcgcccccctccccgtgcgccccccctccccgtgc
gcccccctccccgtgcgccccccctccccgggcgcccccctccccgggcgccccccctccccgtgcgcccccccctc
cccgtgcgccccccctccccgtgcgcgccccgcctcttgcgcccctgcccccaggcgagcggctgccgcggcgcggg
gaggggcgggcgctcggcgactcgtccccggggccccgcgcgggcccgggcagcaggggcgtgatgtcacggcaggg
agggggcgcgggagccgccgggccggcggggaggcgggggaggtgttttccagctttaaaaaggcaggaggcagagc
gcggccctgcgtcagagcgagactcagagg
NFATc1P-MMP9
(DNA)
(SEQ ID NO: 647)
aggcaggaggaagaggaaaggggcgcagggcgctcggggagcagagccgggggcccgcggtggccgcagaggccggg
ccggggcgcagaggccgggcgagctggccgcgctctgggccgccgcctccggaactccctgcgcctggcgcgcggcc
accgtggtcccggcaacggcattaaacagagggaaacagacccgggattccgtcacccgggcggggggataaggacg
gctttgagagcagacaggaaaagggagcttttctgcatggggtgaaaaaattatttattgaaggaggaggaggcggc
agcggaggaaggggaggggcgggaggaggaggaagagccggccgcccccgccccggccccggctcctcaggagccaa
gggcagcctcgccaggtcggtcccgggctcgaggaccgcggctggggtcgaggggctcagtctcccacgtgaccggc
tgggcgcgccccgccagacccggcctcgggattccctcctcccggcgagtctccgcccgccccgtcctggaggtggg
gagaaggagggcggggcgggggggacggaaactctccccgccaaatcctggccccaggcctggggacactcgcggcg
ggaagatttggaggggaggggagggggaggggcgtgggggcgcggcctcgctggagtccccctgaccccccgacccc
cgcccaccggcctgggcgtcctcccgcggcccctcctcccctcccggcgcccggtgctctggggcgcgtgccacgcc
tggctcggcgccgtaggggcccccgcaggtagagacccctggaaatggcctcgacgccgcaggagcgaggcggccac
caccccgctaatccgggcacgtctctccaggccgaggcctgcggtggaaaagccggggttccatttgtgctgagtcg
gggcggccgaatggagccaggcctcgggacgcgggacggacgggctctggccgcgcaccttcgcgggctctgcagcg
cccgaccgcctcccccggcagggaggaggcgcttgtggggggcacccacggggcacagtgatccctgggggtctgcg
gacctcctgggccccgcagcagacacgagtttagcctttgggtttagtttaaatcacataagggtgtcgtgcaatcg
atttatggtttctacacaccagacactttaacctccaaccccccccatccaagccaacaagaaaatgcggtgccgtg
ttggcagctgagctgcgcccgaagagacgcagggagacgtaagagaggaaagtgtgagtggccggggggcctccccc
cgtcagaagtcgcgcagtcgcgcccataaaacgccccctccgggcggctagggcaggtgagcgcgtccccgggcctc
cccacgccggcccctgccacagagccgtctaggtcgagcagatatttacagaataaaaatgacaataactcgacgtc
ccgggacggccacgcaatctgttagtaatttagcgggatgggaatttcctttctagggcctgccagtgaagcgcttt
tccaaatttccacagcgggggaagcctgcgattttacataatgacttcagcatgccgggctttctcgacacccctcc
ccggcccccggcccccgccccccgccccttttccagcagggccgggctccctccggacacccgcgtggactcaggcg
tcccgtctggcccgttcgcccccgtttcccccgccagccccagcgcccccctgcccggcccccggattccccgttcc
cgcccctacgcccccatcccctccccgtgcgcccctccccgtgcgcccccctccccgtgcgccccccctccccgtgc
gcccccctccccgtgcgccccccctccccgggcgcccccctccccgggcgccccccctccccgtgcgcccccccctc
cccgtgcgccccccctccccgtgcgcgccccgcctcttgcgcccctgcccccaggcgagcggctgccgcggcgcggg
gaggggcgggcgctcggcgactcgtccccggggccccgcgcgggcccgggcagcaggggcgtgatgtcacggcaggg
agggggcgcgggagccgccgggccggcggggaggcgggggaggtgttttccagctttaaaaaggcaggaggcagagc
gcggccctgcgtcagagcgagactcagaggtctagagccaccatgagcctctggcagcccctggtcctggtgctcct
ggtgctgggctgctgctttgctgcccccagacagcgccagtccacccttgtgctcttccctggagacctgagaacca
atctcaccgacaggcagctggcagaggaatacctgtaccgctatggttacactcgggtggcagagatgcgtggagag
tcgaaatctctggggcctgcgctgctgcttctccagaagcaactgtccctgcccgagaccggtgagctggatagcgc
cacgctgaaggccatgcgaaccccacggtgcggggtcccagacctgggcagattccaaacctttgagggcgacctca
agtggcaccaccacaacatcacctattggatccaaaactactcggaagacttgccgcgggcggtgattgacgacgcc
tttgcccgcgccttcgcactgtggagcgcggtgacgccgctcaccttcactcgcgtgtacagccgggacgcagacat
cgtcatccagtttggtgtcgcggagcacggagacgggtatcccttcgacgggaaggacgggctcctggcacacgcct
ttcctcctggccccggcattcagggagacgcccatttcgacgatgacgagttgtggtccctgggcaagggcgtcgtg
gttccaactcggtttggaaacgcagatggcgcggcctgccacttccccttcatcttcgagggccgctcctactctgc
ctgcaccaccgacggtcgctccgacggcttgccctggtgcagtaccacggccaactacgacaccgacgaccggtttg
gcttctgccccagcgagagactctacacccaggacggcaatgctgatgggaaaccctgccagtttccattcatcttc
caaggccaatcctactccgcctgcaccacggacggtcgctccgacggctaccgctggtgcgccaccaccgccaacta
cgaccgggacaagctcttcggcttctgcccgacccgagctgactcgacggtgatggggggcaactcggcgggggagc
tgtgcgtcttccccttcactttcctgggtaaggagtactcgacctgtaccagcgagggccgcggagatgggcgcctc
tggtgcgctaccacctcgaactttgacagcgacaagaagtggggcttctgcccggaccaaggatacagtttgttcct
cgtggcggcgcatgagttcggccacgcgctgggcttagatcattcctcagtgccggaggcgctcatgtaccctatgt
accgcttcactgaggggccccccttgcataaggacgacgtgaatggcatccggcacctctatggtcctcgccctgaa
cctgagccacggcctccaaccaccaccacaccgcagcccacggctcccccgacggtctgccccaccggaccccccac
tgtccacccctcagagcgccccacagctggccccacaggtcccccctcagctggccccacaggtccccccactgctg
gcccttctacggccactactgtgcctttgagtccggtggacgatgcctgcaacgtgaacatcttcgacgccatcgcg
gagattgggaaccagctgtatttgttcaaggatgggaagtactggcgattctctgagggcagggggagccggccgca
gggccccttccttatcgccgacaagtggcccgcgctgccccgcaagctggactcggtctttgaggagcggctctcca
agaagcttttcttcttctctgggcgccaggtgtgggtgtacacaggcgcgtcggtgctgggcccgaggcgtctggac
aagctgggcctgggagccgacgtggcccaggtgaccggggccctccggagtggcagggggaagatgctgctgttcag
cgggcggcgcctctggaggttcgacgtgaaggcgcagatggtggatccccggagcgccagcgaggtggaccggatgt
tccccggggtgcctttggacacgcacgacgtcttccagtaccgagagaaagcctatttctgccaggaccgcttctac
tggcgcgtgagttcccggagtgagttgaaccaggtggaccaagtgggctacgtgacctatgacatcctgcagtgccc
tgaggacgattacaaggatgacgacgataagtgataa
NFATc1P-MMP9cat
(DNA)
(SEQ ID NO: 648)
aggcaggaggaagaggaaaggggcgcagggcgctcggggagcagagccgggggcccgcggtggccgcagaggccggg
ccggggcgcagaggccgggcgagctggccgcgctctgggccgccgcctccggaactccctgcgcctggcgcgcggcc
accgtggtcccggcaacggcattaaacagagggaaacagacccgggattccgtcacccgggcggggggataaggacg
gctttgagagcagacaggaaaagggagcttttctgcatggggtgaaaaaattatttattgaaggaggaggaggcggc
agcggaggaaggggaggggcgggaggaggaggaagagccggccgcccccgccccggccccggctcctcaggagccaa
gggcagcctcgccaggtcggtcccgggctcgaggaccgcggctggggtcgaggggctcagtctcccacgtgaccggc
tgggcgcgccccgccagacccggcctcgggattccctcctcccggcgagtctccgcccgccccgtcctggaggtggg
gagaaggagggcggggcgggggggacggaaactctccccgccaaatcctggccccaggcctggggacactcgcggcg
ggaagatttggaggggaggggagggggaggggcgtgggggcgcggcctcgctggagtccccctgaccccccgacccc
cgcccaccggcctgggcgtcctcccgcggcccctcctcccctcccggcgcccggtgctctggggcgcgtgccacgcc
tggctcggcgccgtaggggcccccgcaggtagagacccctggaaatggcctcgacgccgcaggagcgaggcggccac
caccccgctaatccgggcacgtctctccaggccgaggcctgcggtggaaaagccggggttccatttgtgctgagtcg
gggcggccgaatggagccaggcctcgggacgcgggacggacgggctctggccgcgcaccttcgcgggctctgcagcg
cccgaccgcctcccccggcagggaggaggcgcttgtggggggcacccacggggcacagtgatccctgggggtctgcg
gacctcctgggccccgcagcagacacgagtttagcctttgggtttagtttaaatcacataagggtgtcgtgcaatcg
atttatggtttctacacaccagacactttaacctccaaccccccccatccaagccaacaagaaaatgcggtgccgtg
ttggcagctgagctgcgcccgaagagacgcagggagacgtaagagaggaaagtgtgagtggccggggggcctccccc
cgtcagaagtcgcgcagtcgcgcccataaaacgccccctccgggcggctagggcaggtgagcgcgtccccgggcctc
cccacgccggcccctgccacagagccgtctaggtcgagcagatatttacagaataaaaatgacaataactcgacgtc
ccgggacggccacgcaatctgttagtaatttagcgggatgggaatttcctttctagggcctgccagtgaagcgcttt
tccaaatttccacagcgggggaagcctgcgattttacataatgacttcagcatgccgggctttctcgacacccctcc
ccggcccccggcccccgccccccgccccttttccagcagggccgggctccctccggacacccgcgtggactcaggcg
tcccgtctggcccgttcgcccccgtttcccccgccagccccagcgcccccctgcccggcccccggattccccgttcc
cgcccctacgcccccatcccctccccgtgcgcccctccccgtgcgcccccctccccgtgcgccccccctccccgtgc
gcccccctccccgtgcgccccccctccccgggcgcccccctccccgggcgccccccctccccgtgcgcccccccctc
cccgtgcgccccccctccccgtgcgcgccccgcctcttgcgcccctgcccccaggcgagcggctgccgcggcgcggg
gaggggcgggcgctcggcgactcgtccccggggccccgcgcgggcccgggcagcaggggcgtgatgtcacggcaggg
agggggcgcgggagccgccgggccggcggggaggcgggggaggtgttttccagctttaaaaaggcaggaggcagagc
gcggccctgcgtcagagcgagactcagaggtctagagccaccatgttccaaacctttgagggcgacctcaagtggca
ccaccacaacatcacctattggatccaaaactactcggaagacttgccgcgggcggtgattgacgacgcctttgccc
gcgccttcgcactgtggagcgcggtgacgccgctcaccttcactcgcgtgtacagccgggacgcagacatcgtcatc
cagtttggtgtcgcggagcacggagacgggtatcccttcgacgggaaggacgggctcctggcacacgcctttcctcc
tggccccggcattcagggagacgcccatttcgacgatgacgagttgtggtccctgggcaagggcgtcgtggttccaa
ctcggtttggaaacgcagatggcgcggcctgccacttccccttcatcttcgagggccgctcctactctgcctgcacc
accgacggtcgctccgacggcttgccctggtgcagtaccacggccaactacgacaccgacgaccggtttggcttctg
ccccagcgagagactctacacccaggacggcaatgctgatgggaaaccctgccagtttccattcatcttccaaggcc
aatcctactccgcctgcaccacggacggtcgctccgacggctaccgctggtgcgccaccaccgccaactacgaccgg
gacaagctcttcggcttctgcccgacccgagctgactcgacggtgatggggggcaactcggcgggggagctgtgcgt
cttccccttcactttcctgggtaaggagtactcgacctgtaccagcgagggccgcggagatgggcgcctctggtgcg
ctaccacctcgaactttgacagcgacaagaagtggggcttctgcccggaccaaggatacagtttgttcctcgtggcg
gcgcatgagttcggccacgcgctgggcttagatcattcctcagtgccggaggcgctcatgtaccctatgtaccgctt
cactgaggggccccccttgcataaggacgacgtgaatggcatccggcacctctatggtcctcgccctgaacctgatt
acaaggatgacgacgataagtgataa
NFAT response element
(DNA)
(SEQ ID NO: 649)
ggaggaaaaactgtttcatacagaaggcgt
(DNA)
(SEQ ID NO: 650)
ggaggaaaaactgtttcatacagaaggcgtggaggaaaaactgtttcatacagaaggcgtggaggaaaaactgtttc
atacagaaggcgt
CMV minimal promoter
(DNA)
(SEQ ID NO: 651)
aggtaggcgtgtacggtgggaggtctatataagcagagctggtttagtgaaccgtcagatc
NFATREmCMV-MMP9
(DNA)
(SEQ ID NO: 652)
ggaggaaaaactgtttcatacagaaggcgtggaggaaaaactgtttcatacagaaggcgtggaggaaaaactgtttc
atacagaaggcgtagatctagactcaggtaggcgtgtacggtgggaggtctatataagcagagctggtttagtgaac
cgtcagatctctagagccaccatgagcctctggcagcccctggtcctggtgctcctggtgctgggctgctgctttgc
tgcccccagacagcgccagtccacccttgtgctcttccctggagacctgagaaccaatctcaccgacaggcagctgg
cagaggaatacctgtaccgctatggttacactcgggtggcagagatgcgtggagagtcgaaatctctggggcctgcg
ctgctgcttctccagaagcaactgtccctgcccgagaccggtgagctggatagcgccacgctgaaggccatgcgaac
cccacggtgcggggtcccagacctgggcagattccaaacctttgagggcgacctcaagtggcaccaccacaacatca
cctattggatccaaaactactcggaagacttgccgcgggcggtgattgacgacgcctttgcccgcgccttcgcactg
tggagcgcggtgacgccgctcaccttcactcgcgtgtacagccgggacgcagacatcgtcatccagtttggtgtcgc
ggagcacggagacgggtatcccttcgacgggaaggacgggctcctggcacacgcctttcctcctggccccggcattc
agggagacgcccatttcgacgatgacgagttgtggtccctgggcaagggcgtcgtggttccaactcggtttggaaac
gcagatggcgcggcctgccacttccccttcatcttcgagggccgctcctactctgcctgcaccaccgacggtcgctc
cgacggcttgccctggtgcagtaccacggccaactacgacaccgacgaccggtttggcttctgccccagcgagagac
tctacacccaggacggcaatgctgatgggaaaccctgccagtttccattcatcttccaaggccaatcctactccgcc
tgcaccacggacggtcgctccgacggctaccgctggtgcgccaccaccgccaactacgaccgggacaagctcttcgg
cttctgcccgacccgagctgactcgacggtgatggggggcaactcggcgggggagctgtgcgtcttccccttcactt
tcctgggtaaggagtactcgacctgtaccagcgagggccgcggagatgggcgcctctggtgcgctaccacctcgaac
tttgacagcgacaagaagtggggcttctgcccggaccaaggatacagtttgttcctcgtggcggcgcatgagttcgg
ccacgcgctgggcttagatcattcctcagtgccggaggcgctcatgtaccctatgtaccgcttcactgaggggcccc
ccttgcataaggacgacgtgaatggcatccggcacctctatggtcctcgccctgaacctgagccacggcctccaacc
accaccacaccgcagcccacggctcccccgacggtctgccccaccggaccccccactgtccacccctcagagcgccc
cacagctggccccacaggtcccccctcagctggccccacaggtccccccactgctggcccttctacggccactactg
tgcctttgagtccggtggacgatgcctgcaacgtgaacatcttcgacgccatcgcggagattgggaaccagctgtat
ttgttcaaggatgggaagtactggcgattctctgagggcagggggagccggccgcagggccccttccttatcgccga
caagtggcccgcgctgccccgcaagctggactcggtctttgaggagcggctctccaagaagcttttcttcttctctg
ggcgccaggtgtgggtgtacacaggcgcgtcggtgctgggcccgaggcgtctggacaagctgggcctgggagccgac
gtggcccaggtgaccggggccctccggagtggcagggggaagatgctgctgttcagcgggcggcgcctctggaggtt
cgacgtgaaggcgcagatggtggatccccggagcgccagcgaggtggaccggatgttccccggggtgcctttggaca
cgcacgacgtcttccagtaccgagagaaagcctatttctgccaggaccgcttctactggcgcgtgagttcccggagt
gagttgaaccaggtggaccaagtgggctacgtgacctatgacatcctgcagtgccctgaggacgattacaaggatga
cgacgataagtgataa
NFATREmCMV-MMP9cat
(DNA)
(SEQ ID NO: 653)
ggaggaaaaactgtttcatacagaaggcgtggaggaaaaactgtttcatacagaaggcgtggaggaaaaactgtttc
atacagaaggcgtagatctagactcaggtaggcgtgtacggtgggaggtctatataagcagagctggtttagtgaac
cgtcagatctctagagccaccatgttccaaacctttgagggcgacctcaagtggcaccaccacaacatcacctattg
gatccaaaactactcggaagacttgccgcgggcggtgattgacgacgcctttgcccgcgccttcgcactgtggagcg
cggtgacgccgctcaccttcactcgcgtgtacagccgggacgcagacatcgtcatccagtttggtgtcgcggagcac
ggagacgggtatcccttcgacgggaaggacgggctcctggcacacgcctttcctcctggccccggcattcagggaga
cgcccatttcgacgatgacgagttgtggtccctgggcaagggcgtcgtggttccaactcggtttggaaacgcagatg
gcgcggcctgccacttccccttcatcttcgagggccgctcctactctgcctgcaccaccgacggtcgctccgacggc
ttgccctggtgcagtaccacggccaactacgacaccgacgaccggtttggcttctgccccagcgagagactctacac
ccaggacggcaatgctgatgggaaaccctgccagtttccattcatcttccaaggccaatcctactccgcctgcacca
cggacggtcgctccgacggctaccgctggtgcgccaccaccgccaactacgaccgggacaagctcttcggcttctgc
ccgacccgagctgactcgacggtgatggggggcaactcggcgggggagctgtgcgtcttccccttcactttcctggg
taaggagtactcgacctgtaccagcgagggccgcggagatgggcgcctctggtgcgctaccacctcgaactttgaca
gcgacaagaagtggggcttctgcccggaccaaggatacagtttgttcctcgtggcggcgcatgagttcggccacgcg
ctgggcttagatcattcctcagtgccggaggcgctcatgtaccctatgtaccgcttcactgaggggccccccttgca
taaggacgacgtgaatggcatccggcacctctatggtcctcgccctgaacctgattacaaggatgacgacgataagt
gataa
C2 scFir
(DNA)
(SEQ ID NO: 654)
gaggtgcagctggtggagtctgggggaggcctggtcaagcctggggggtccctgagactctcctgtgcagcctctgg
attcaccttcagtggctatgccatgagctgggtccgccaggctccagggaaggggctggagtgggtctcaaccatta
gtagtggcggaacctacatatactaccccgactcagtgaagggccgattcaccatctccagagacaacgccaagaac
tcactgtatctgcaaatgaacagcctgagagccgaggacacggccgtgtattactgtgcgagacttgggggggataa
ttactacgaatacttcgatgtctggggcaaagggaccacggtcaccgtctcctccggcggtggcggatccggcggtg
gcggatccggcggtggcggatccgacattgtgctgacccagtctccagcctccttggccgtgtctccaggacagagg
gccaccatcacctgcagagccagtaagagtgtcagtaccagcggatactcctacatgcactggtatcagcagaaacc
aggacaacctcctaaactcctgatttacctggcatccaatctggagagcggggtcccagccaggttcagcggcagtg
ggtctgggaccgatttcaccctcacaattaatcctgtggaagctaatgatactgcaaattattactgtcagcacagt
agggagctgcctttcacattcggcggagggaccaaggtggagatcaaacgaact
(amino acids)
(SEQ ID NO: 655)
EVQLVESGGGLVKPGGSLRLSCAASGFTFSGYAMSWVRQAPGKGLEWVSTISSGGTYIYYPDSVKGRFTISRDNAKN
SLYLQMNSLRAEDTAVYYCARLGGDNYYEYFDVWGKGTTVTVSSGGGGSGGGGSGGGGSDIVLTQSPASLAVSPGQR
ATITCRASKSVSTSGYSYMHWYQQKPGQPPKLLIYLASNLESGVPARFSGSGSGTDFTLTINPVEANDTANYYCQHS
RELPFTFGGGTKVEIKRT
CD8 transmembrane domain
(DNA)
(SEQ ID NO: 656)
atctacatctgggcgcccttggccgggacttgtggggtccttctcctgtcactggttatcaccctttactgc
(amino acids)
(SEQ ID NO: 657)
IYIWAPLAGTCGVLLLSLVITLYC
4-1BB domain
(DNA)
(SEQ ID NO: 658)
aaacggggcagaaagaaactcctgtatatattcaaacaaccatttatgagaccagtacaaactactcaagaggaaga
tggctgtagctgccgatttccagaagaagaagaaggaggatgtgaactg
(amino acids)
(SEQ ID NO: 659)
KRGRKKLLYIFKQPFMRPVQTTQEEDGCSCRFPEEEEGGCEL
CD3 zeta domain
(DNA)
(SEQ ID NO: 660)
agagtgaagttcagcaggagcgcagacgcccccgcgtacaagcagggccagaaccagctctataacgagctcaatct
aggacgaagagaggagtacgatgttttggacaagagacgtggccgggaccctgagatggggggaaagccgagaagga
agaaccctcaggaaggcctgtacaatgaactgcagaaagataagatggcggaggcctacagtgagattgggatgaaa
ggcgagcgccggaggggcaaggggcacgatggcctttaccagggtctcagtacagccaccaaggacacctacgacgc
ccttcacatgcaggccctgccccctcgc
(amino acids)
(SEQ ID NO: 661)
RVKFSRSADAPAYKQGQNQLYNELNLGRREEYDVLDKRRGRDPEMGGKPRRKNPQEGLYNELQKDKMAEAYSEIGMK
GERRRGKGHDGLYQGLSTATKDTYDALHMQALPPR
CAR-T C2 CD8/CD8/4-1BB/CD3z #44
N-CD81s-huMNC2scFv-CD8ecd fragment- CDB transmembrane- 4-1BB- CD3zeta-C
(DNA)
(SEQ ID NO: 718)
atggccttaccagtgaccgccttgctcctgccgctggccttgctgctccacgccgccaggccggaggtgcagctggt
ggagtctgggggaggcctggtcaagcctggggggtccctgagactctcctgtgcagcctctggattcaccttcagtg
gctatgccatgagctgggtccgccaggctccagggaaggggctggagtgggtctcaaccattagtagtggcggaacc
tacatatactaccccgactcagtgaagggccgattcaccatctccagagacaacgccaagaactcactgtatctgca
aatgaacagcctgagagccgaggacacggccgtgtattactgtgcgagacttgggggggataattactacgaatact
tcgatgtctggggcaaagggaccacggtcaccgtctcctccggcggtggcggatccggcggtggcggatccggcggt
ggcggatccgacattgtgctgacccagtctccagcctccttggccgtgtctccaggacagagggccaccatcacctg
cagagccagtaagagtgtcagtaccagcggatactcctacatgcactggtatcagcagaaaccaggacaacctccta
aactcctgatttacctggcatccaatctggagagcggggtcccagccaggttcagcggcagtgggtctgggaccgat
ttcaccctcacaattaatcctgtggaagctaatgatactgcaaattattactgtcagcacagtagggagctgccttt
cacattcggcggagggaccaaggtggagatcaaacgaactacaacaacccctgcccccagacctcctaccccagccc
ctacaattgccagccagcctctgagcctgaggcccgaggcttgtagacctgctgctggcggagccgtgcacaccaga
ggactggatttcgcctgcgacatctacatctgggcgcccttggccgggacttgtggggtccttctcctgtcactggt
tatcaccctttactgcaaacggggcagaaagaaactcctgtatatattcaaacaaccatttatgagaccagtacaaa
ctactcaagaggaagatggctgtagctgccgatttccagaagaagaagaaggaggatgtgaactgagagtgaagttc
agcaggagcgcagacgcccccgcgtacaagcagggccagaaccagctctataacgagctcaatctaggacgaagaga
ggagtacgatgttttggacaagagacgtggccgggaccctgagatggggggaaagccgagaaggaagaaccctcagg
aaggcctgtacaatgaactgcagaaagataagatggcggaggcctacagtgagattgggatgaaaggcgagcgccgg
aggggcaaggggcacgatggcctttaccagggtctcagtacagccaccaaggacacctacgacgcccttcacatgca
ggccctgccccctcgctgataa
(amino acids)
(SEQ ID NO: 719)
MALPVTALLLPLALLLHAARPEVQLVESGGGLVKPGGSLRLSCAASGFTFSGYAMSWVRQAPGKGLEWVSTISSGGT
YIYYPDSVKGRFTISRDNAKNSLYLQMNSLRAEDTAVYYCARLGGDNYYEYFDVWGKGTTVTVSSGGGGSGGGGSGG
GGSDIVLTQSPASLAVSPGQRATITCRASKSVSTSGYSYMHWYQQKPGQPPKLLIYLASNLESGVPARFSGSGSGTD
FTLTINPVEANDTANYYCQHSRELPFTEGGGTKVEIKRTTTTPAPRPPTPAPTIASQPLSLRPEACRPAAGGAVHTR
GLDFACDIYIWAPLAGTCGVLLLSLVITLYCKRGRKKLLYIFKQPFMRPVQTTQEEDGCSCRFPEEEEGGCELRVKF
SRSADAPAYKQGQNQLYNELNLGRREEYDVLDKRRGRDPEMGGKPRRKNPQEGLYNELQKDKMAEAYSEIGMKGERR
RGKGHDGLYQGLSTATKDTYDALHMQALPPR**
NFATc1P2-MMP9
(DNA)
(SEQ ID NO: 774)
caggcctggggacactcgcggcgggaagatttggaggggaggggagggggaggggcgtgggggcgcggcctcgctgg
agtccccctgaccccccgacccccgcccaccggcctgggcgtcctcccgcggcccctcctcccctcccggcgcccgg
tgctctggggcgcgtgccacgcctggctcggcgccgtaggggcccccgcaggtagagacccctggaaatggcctcga
cgccgcaggagcgaggcggccaccaccccgctaatccgggcacgtctctccaggccgaggcctgcggtggaaaagcc
ggggttccatttgtgctgagtcggggcggccgaatggagccaggcctcgggacgcgggacggacgggctctggccgc
gcaccttcgcgggctctgcagcgcccgaccgcctcccccggcagggaggaggcgcttgtggggggcacccacggggc
acagtgatccctgggggtctgcggacctcctgggccccgcagcagacacgagtttagcctttgggtttagtttaaat
cacataagggtgtcgtgcaatcgatttatggtttctacacaccagacactttaacctccaaccccccccatccaaag
ccaacaagaaaatgcggtgccgtgttggcagctgagctgcgcccgaagagacgcagggagacgtaagagaggaaagt
gtgagtggccggggggcctccccccgtcagaagtcgcgcagtcgcgcccataaaacgccccctccgggcggctaggg
caggtgagcgcgtccccgggcctccccacgccggcccctgccacaggccgtctaggtcgagcagatatttacagaat
aaaaatgacaataactcgacgtcccgggacggccacgcaatctgttagtaatttagcgggatgggaatttcctttct
agggcctgccagtgaagcgcttttccaaatttccacagcgggggaagcctgcgattttacataatgacttcagcatg
ccgggctttctcgacacccctccccggcccccggcccccgccccccgccccttttccagcagggccgggctccctcc
ggacacccgcgtggactcaggcgtcccgtctggcccgttcgcccccgtttcccccgccagccccagcgcccccctgc
ccggcccccggattccccgttcccgcccctacgcccccatcccctccccgtgcgcccctccccgtgcgcccccctcc
ccgtgcgccccccctccccgtgcgcccccctccccgtgcgccccccctccccgggcgcccccctccccgggcgcccc
ccctccccgtgcgcccccccctccccgtgcgccccccctccccgtgcgcgccccgcctcttgcgcccctgcccccag
gcgagcggctgccgcggcgcggggaggggcgggcgctcggcgactcgtccccggggccccgcgcgggcccgggcagc
aggggcgtgatgtcacggcagggagggggcgcgggagccgccgggccggcggggaggcgggggaggtgttttccagc
tttaaaaaggcaggaggcagagcgcggccctgcgtcagagcgagactcagaggctccgaactcgccggcggagtcgc
cgcgccagatcccagcagcagggcgcggaagcttctctcgacattcgtttctagagccaccatgagcctctggcagc
ccctggtcctggtgctcctggtgctgggctgctgctttgctgcccccagacagcgccagtccacccttgtgctcttc
cctggagacctgagaaccaatctcaccgacaggcagctggcagaggaatacctgtaccgctatggttacactcgggt
ggcagagatgcgtggagagtcgaaatctctggggcctgcgctgctgcttctccagaagcaactgtccctgcccgaga
ccggtgagctggatagcgccacgctgaaggccatgcgaaccccacggtgcggggtcccagacctgggcagattccaa
acctttgagggcgacctcaagtggcaccaccacaacatcacctattggatccaaaactactcggaagacttgccgcg
ggcggtgattgacgacgcctttgcccgcgccttcgcactgtggagcgcggtgacgccgctcaccttcactcgcgtgt
acagccgggacgcagacatcgtcatccagtttggtgtcgcggagcacggagacgggtatcccttcgacgggaaggac
gggctcctggcacacgcctttcctcctggccccggcattcagggagacgcccatttcgacgatgacgagttgtggtc
cctgggcaagggcgtcgtggttccaactcggtttggaaacgcagatggcgcggcctgccacttccccttcatcttcg
agggccgctcctactctgcctgcaccaccgacggtcgctccgacggcttgccctggtgcagtaccacggccaactac
gacaccgacgaccggtttggcttctgccccagcgagagactctacacccaggacggcaatgctgatgggaaaccctg
ccagtttccattcatcttccaaggccaatcctactccgcctgcaccacggacggtcgctccgacggctaccgctggt
gcgccaccaccgccaactacgaccgggacaagctcttcggcttctgcccgacccgagctgactcgacggtgatgggg
ggcaactcggcgggggagctgtgcgtcttccccttcactttcctgggtaaggagtactcgacctgtaccagcgaggg
ccgcggagatgggcgcctctggtgcgctaccacctcgaactttgacagcgacaagaagtggggcttctgcccggacc
aaggatacagtttgttcctcgtggcggcgcatgagttcggccacgcgctgggcttagatcattcctcagtgccggag
gcgctcatgtaccctatgtaccgcttcactgaggggccccccttgcataaggacgacgtgaatggcatccggcacct
ctatggtcctcgccctgaacctgagccacggcctccaaccaccaccacaccgcagcccacggctcccccgacggtct
gccccaccggaccccccactgtccacccctcagagcgccccacagctggccccacaggtcccccctcagctggcccc
acaggtccccccactgctggcccttctacggccactactgtgcctttgagtccggtggacgatgcctgcaacgtgaa
catcttcgacgccatcgcggagattgggaaccagctgtatttgttcaaggatgggaagtactggcgattctctgagg
gcagggggagccggccgcagggccccttccttatcgccgacaagtggcccgcgctgccccgcaagctggactcggtc
tttgaggagcggctctccaagaagcttttcttcttctctgggcgccaggtgtgggtgtacacaggcgcgtcggtgct
gggcccgaggcgtctggacaagctgggcctgggagccgacgtggcccaggtgaccggggccctccggagtggcaggg
ggaagatgctgctgttcagcgggcggcgcctctggaggttcgacgtgaaggcgcagatggtggatccccggagcgcc
agcgaggtggaccggatgttccccggggtgcctttggacacgcacgacgtcttccagtaccgagagaaagcctattt
ctgccaggaccgcttctactggcgcgtgagttcccggagtgagttgaaccaggtggaccaagtgggctacgtgacct
atgacatcctgcagtgccctgaggacgattacaaggatgacgacgataagtgataa
NFATc1P2-MMP9cat
(DNA)
(SEQ ID NO: 775)
caggcctggggacactcgcggcgggaagatttggaggggaggggagggggaggggcgtgggggcgcggcctcgctgg
agtccccctgaccccccgacccccgcccaccggcctgggcgtcctcccgcggcccctcctcccctcccggcgcccgg
tgctctggggcgcgtgccacgcctggctcggcgccgtaggggcccccgcaggtagagacccctggaaatggcctcga
cgccgcaggagcgaggcggccaccaccccgctaatccgggcacgtctctccaggccgaggcctgcggtggaaaagcc
ggggttccatttgtgctgagtcggggcggccgaatggagccaggcctcgggacgcgggacggacgggctctggccgc
gcaccttcgcgggctctgcagcgcccgaccgcctcccccggcagggaggaggcgcttgtggggggcacccacggggc
acagtgatccctgggggtctgcggacctcctgggccccgcagcagacacgagtttagcctttgggtttagtttaaat
cacataagggtgtcgtgcaatcgatttatggtttctacacaccagacactttaacctccaaccccccccatccaaag
ccaacaagaaaatgcggtgccgtgttggcagctgagctgcgcccgaagagacgcagggagacgtaagagaggaaagt
gtgagtggccggggggcctccccccgtcagaagtcgcgcagtcgcgcccataaaacgccccctccgggcggctaggg
caggtgagcgcgtccccgggcctccccacgccggcccctgccacaggccgtctaggtcgagcagatatttacagaat
aaaaatgacaataactcgacgtcccgggacggccacgcaatctgttagtaatttagcgggatgggaatttcctttct
agggcctgccagtgaagcgcttttccaaatttccacagcgggggaagcctgcgattttacataatgacttcagcatg
ccgggctttctcgacacccctccccggcccccggcccccgccccccgccccttttccagcagggccgggctccctcc
ggacacccgcgtggactcaggcgtcccgtctggcccgttcgcccccgtttcccccgccagccccagcgcccccctgc
ccggcccccggattccccgttcccgcccctacgcccccatcccctccccgtgcgcccctccccgtgcgcccccctcc
ccgtgcgccccccctccccgtgcgcccccctccccgtgcgccccccctccccgggcgcccccctccccgggcgcccc
ccctccccgtgcgcccccccctccccgtgcgccccccctccccgtgcgcgccccgcctcttgcgcccctgcccccag
gcgagcggctgccgcggcgcggggaggggcgggcgctcggcgactcgtccccggggccccgcgcgggcccgggcagc
aggggcgtgatgtcacggcagggagggggcgcgggagccgccgggccggcggggaggcgggggaggtgttttccagc
tttaaaaaggcaggaggcagagcgcggccctgcgtcagagcgagactcagaggctccgaactcgccggcggagtcgc
cgcgccagatcccagcagcagggcgcggaagcttctctcgacattcgtttctagagccaccatgagcctctggcagc
ccctggtcctggtgctcctggtgctgggctgctgctttgctttccaaacctttgagggcgacctcaagtggcaccac
cacaacatcacctattggatccaaaactactcggaagacttgccgcgggcggtgattgacgacgcctttgcccgcgc
cttcgcactgtggagcgcggtgacgccgctcaccttcactcgcgtgtacagccgggacgcagacatcgtcatccagt
ttggtgtcgcggagcacggagacgggtatcccttcgacgggaaggacgggctcctggcacacgcctttcctcctggc
cccggcattcagggagacgcccatttcgacgatgacgagttgtggtccctgggcaagggcgtcgtggttccaactcg
gtttggaaacgcagatggcgcggcctgccacttccccttcatcttcgagggccgctcctactctgcctgcaccaccg
acggtcgctccgacggcttgccctggtgcagtaccacggccaactacgacaccgacgaccggtttggcttctgcccc
agcgagagactctacacccaggacggcaatgctgatgggaaaccctgccagtttccattcatcttccaaggccaatc
ctactccgcctgcaccacggacggtcgctccgacggctaccgctggtgcgccaccaccgccaactacgaccgggaca
agctcttcggcttctgcccgacccgagctgactcgacggtgatggggggcaactcggcgggggagctgtgcgtcttc
cccttcactttcctgggtaaggagtactcgacctgtaccagcgagggccgcggagatgggcgcctctggtgcgctac
cacctcgaactttgacagcgacaagaagtggggcttctgcccggaccaaggatacagtttgttcctcgtggcggcgc
atgagttcggccacgcgctgggcttagatcattcctcagtgccggaggcgctcatgtaccctatgtaccgcttcact
gaggggccccccttgcataaggacgacgtgaatggcatccggcacctctatggtcctcgccctgaacctgattacaa
ggatgacgacgataagtgataa
NFAT response element 2
(DNA)
(SEQ ID NO: 776)
aagaggaaaatttgtttcatacagaaggcgtt
NFAT response element 2 repeats
(DNA)
(SEQ ID NO: 777)
aagaggaaaatttgtttcatacagaaggcgttaagaggaaaatttgtttcatacagaaggcgttaagaggaaaattt
gtttcatacagaaggcgttaagaggaaaatttgtttcatacagaaggcgtt
CMV minimal promoter 2
(DNA)
(SEQ ID NO: 778)
taggcgtgtacggtgggaggcctatataagcagagctcgtttagtgaaccgtcagatcgcctggagacgccatccac
gctgttttgacctccatagaagacaccgggaccgatccagc
NFATRE2mCMV2-MMP9
(DNA)
(SEQ ID NO: 779)
aagaggaaaatttgtttcatacagaaggcgttaagaggaaaatttgtttcatacagaaggcgttaagaggaaaattt
gtttcatacagaaggcgttaagaggaaaatttgtttcatacagaaggcgttactagttaggcgtgtacggtgggagg
cctatataagcagagctcgtttagtgaaccgtcagatcgcctggagacgccatccacgctgttttgacctccataga
agacaccgggaccgatccagcctctcgacattcgtttctagagccaccatgagcctctggcagcccctggtcctggt
gctcctggtgctgggctgctgctttgctgcccccagacagcgccagtccacccttgtgctcttccctggagacctga
gaaccaatctcaccgacaggcagctggcagaggaatacctgtaccgctatggttacactcgggtggcagagatgcgt
ggagagtcgaaatctctggggcctgcgctgctgcttctccagaagcaactgtccctgcccgagaccggtgagctgga
tagcgccacgctgaaggccatgcgaaccccacggtgcggggtcccagacctgggcagattccaaacctttgagggcg
acctcaagtggcaccaccacaacatcacctattggatccaaaactactcggaagacttgccgcgggcggtgattgac
gacgcctttgcccgcgccttcgcactgtggagcgcggtgacgccgctcaccttcactcgcgtgtacagccgggacgc
agacatcgtcatccagtttggtgtcgcggagcacggagacgggtatcccttcgacgggaaggacgggctcctggcac
acgcctttcctcctggccccggcattcagggagacgcccatttcgacgatgacgagttgtggtccctgggcaagggc
gtcgtggttccaactcggtttggaaacgcagatggcgcggcctgccacttccccttcatcttcgagggccgctccta
ctctgcctgcaccaccgacggtcgctccgacggcttgccctggtgcagtaccacggccaactacgacaccgacgacc
ggtttggcttctgccccagcgagagactctacacccaggacggcaatgctgatgggaaaccctgccagtttccattc
atcttccaaggccaatcctactccgcctgcaccacggacggtcgctccgacggctaccgctggtgcgccaccaccgc
caactacgaccgggacaagctcttcggcttctgcccgacccgagctgactcgacggtgatggggggcaactcggcgg
gggagctgtgcgtcttccccttcactttcctgggtaaggagtactcgacctgtaccagcgagggccgcggagatggg
cgcctctggtgcgctaccacctcgaactttgacagcgacaagaagtggggcttctgcccggaccaaggatacagttt
gttcctcgtggcggcgcatgagttcggccacgcgctgggcttagatcattcctcagtgccggaggcgctcatgtacc
ctatgtaccgcttcactgaggggccccccttgcataaggacgacgtgaatggcatccggcacctctatggtcctcgc
cctgaacctgagccacggcctccaaccaccaccacaccgcagcccacggctcccccgacggtctgccccaccggacc
ccccactgtccacccctcagagcgccccacagctggccccacaggtcccccctcagctggccccacaggtcccccca
ctgctggcccttctacggccactactgtgcctttgagtccggtggacgatgcctgcaacgtgaacatcttcgacgcc
atcgcggagattgggaaccagctgtatttgttcaaggatgggaagtactggcgattctctgagggcagggggagccg
gccgcagggccccttccttatcgccgacaagtggcccgcgctgccccgcaagctggactcggtctttgaggagcggc
tctccaagaagcttttcttcttctctgggcgccaggtgtgggtgtacacaggcgcgtcggtgctgggcccgaggcgt
ctggacaagctgggcctgggagccgacgtggcccaggtgaccggggccctccggagtggcagggggaagatgctgct
gttcagcgggcggcgcctctggaggttcgacgtgaaggcgcagatggtggatccccggagcgccagcgaggtggacc
ggatgttccccggggtgcctttggacacgcacgacgtcttccagtaccgagagaaagcctatttctgccaggaccgc
ttctactggcgcgtgagttcccggagtgagttgaaccaggtggaccaagtgggctacgtgacctatgacatcctgca
gtgccctgaggacgattacaaggatgacgacgataagtgataa
NFATRE2mCMV2-MMP9cat
(DNA)
(SEQ ID NO: 780)
aagaggaaaatttgtttcatacagaaggcgttaagaggaaaatttgtttcatacagaaggcgttaagaggaaaattt
gtttcatacagaaggcgttaagaggaaaatttgtttcatacagaaggcgttactagttaggcgtgtacggtgggagg
cctatataagcagagctcgtttagtgaaccgtcagatcgcctggagacgccatccacgctgttttgacctccataga
agacaccgggaccgatccagcctcgagctctcgacattcgtttctagagccaccatgagcctctggcagcccctggt
cctggtgctcctggtgctgggctgctgctttgctttccaaacctttgagggcgacctcaagtggcaccaccacaaca
tcacctattggatccaaaactactcggaagacttgccgcgggcggtgattgacgacgcctttgcccgcgccttcgca
ctgtggagcgcggtgacgccgctcaccttcactcgcgtgtacagccgggacgcagacatcgtcatccagtttggtgt
cgcggagcacggagacgggtatcccttcgacgggaaggacgggctcctggcacacgcctttcctcctggccccggca
ttcagggagacgcccatttcgacgatgacgagttgtggtccctgggcaagggcgtcgtggttccaactcggtttgga
aacgcagatggcgcggcctgccacttccccttcatcttcgagggccgctcctactctgcctgcaccaccgacggtcg
ctccgacggcttgccctggtgcagtaccacggccaactacgacaccgacgaccggtttggcttctgccccagcgaga
gactctacacccaggacggcaatgctgatgggaaaccctgccagtttccattcatcttccaaggccaatcctactcc
gcctgcaccacggacggtcgctccgacggctaccgctggtgcgccaccaccgccaactacgaccgggacaagctctt
cggcttctgcccgacccgagctgactcgacggtgatggggggcaactcggcgggggagctgtgcgtcttccccttca
ctttcctgggtaaggagtactcgacctgtaccagcgagggccgcggagatgggcgcctctggtgcgctaccacctcg
aactttgacagcgacaagaagtggggcttctgcccggaccaaggatacagtttgttcctcgtggcggcgcatgagtt
cggccacgcgctgggcttagatcattcctcagtgccggaggcgctcatgtaccctatgtaccgcttcactgaggggc
cccccttgcataaggacgacgtgaatggcatccggcacctctatggtcctcgccctgaacctgattacaaggatgac
gacgataagtgataa
NFATcl Promoter fragment (P1)
(DNA)
(SEQ ID NO: 781)
aggcaggaggaagaggaaaggggcgcagggcgctcggggagcagagccgggggcccgcggtggccgcagaggccggg
ccggggcgcagaggccgggcgagctggccgcgctctgggccgccgcctccggaactccctgcgcctggcgcgcggcc
accgtggtcccggcaacggcattaaacagagggaaacagacccgggattccgtcacccgggcggggggataaggacg
gctttgagagcagacaggaaaagggagcttttctgcatggggtgaaaaaattatttattgaaggaggaggaggcggc
agcggaggaaggggaggggcgggaggaggaggaagagccggccgcccccgccccggccccggctcctcaggagccaa
gggcagcctcgccaggtcggtcccgggctcgaggaccgcggctggggtcgaggggctcagtctcccacgtgaccggc
tgggcgcgccccgccagacccggcctcgggattccctcctcccggcgagtctccgcccgccccgtcctggaggtggg
gagaaggagggcggggcgggggggacggaaactctccccgccaaatcctggccccaggcctggggacactcgcggcg
ggaagatttggaggggaggggagggggaggggcgtgggggcgcggcctcgctggagtccccctgaccccccgacccc
cgcccaccggcctgggcgtcctcccgcggcccctcctcccctcccggcgcccggtgctctggggcgcgtgccacgcc
tggctcggcgccgtaggggcccccgcaggtagagacccctggaaatggcctcgacgccgcaggagcgaggcggccac
caccccgctaatccgggcacgtctctccaggccgaggcctgcggtggaaaagccggggttccatttgtgctgagtcg
gggcggccgaatggagccaggcctcgggacgcgggacggacgggctctggccgcgcaccttcgcgggctctgcagcg
cccgaccgcctcccccggcagggaggaggcgcttgtggggggcacccacggggcacagtgatccctgggggtctgcg
gacctcctgggccccgcagcagacacgagtttagcctttgggtttagtttaaatcacataagggtgtcgtgcaatcg
atttatggtttctacacaccagacactttaacctccaaccccccccatccaagccaacaagaaaatgcggtgccgtg
ttggcagctgagctgcgcccgaagagacgcagggagacgtaagagaggaaagtgtgagtggccggggggcctccccc
cgtcagaagtcgcgcagtcgcgcccataaaacgccccctccgggcggctagggcaggtgagcgcgtccccgggcctc
cccacgccggcccctgccacagagccgtctaggtcgagcagatatttacagaataaaaatgacaataactcgacgtc
ccgggacggccacgcaatctgttagtaatttagcgggatgggaatttcctttctagggcctgccagtgaagcgcttt
tccaaatttccacagcgggggaagcctgcgattttacataatgacttcagcatgccgggctttctcgacacccctcc
ccggcccccggcccccgccccccgccccttttccagcagggccgggctccctccggacacccgcgtggactcaggcg
tcccgtctggcccgttcgcccccgtttcccccgccagccccagcgcccccctgcccggcccccggattccccgttcc
cgcccctacgcccccatcccctccccgtgcgcccctccccgtgcgcccccctccccgtgcgccccccctccccgtgc
gcccccctccccgtgcgccccccctccccgggcgcccccctccccgggcgccccccctccccgtgcgcccccccctc
cccgtgcgccccccctccccgtgcgcgccccgcctcttgcgcccctgcccccaggcgagcggctgccgcggcgcggg
gaggggcgggcgctcggcgactcgtccccggggccccgcgcgggcccgggcagcaggggcgtgatgtcacggcaggg
agggggcgcgggagccgccgggccggcggggaggcgggggaggtgttttccagctttaaaaaggcaggaggcagagc
gcggccctgcgtcagagcgagactcagaggctccgaactcgccggcggagtcgccgcgccagatcccagcagcaggg
cgcgg
NFATcl Promoter fragment (P2)
(DNA)
(SEQ ID NO: 782)
aggcaggaggaagaggaaaggggcgcagggcgctcggggagcagagccgggggcccgcggtggccgcagaggccggg
ccggggcgcagaggccgggcgagctggccgcgctctgggccgccgcctccggaactccctgcgcctggcgcgcggcc
accgtggtcccggcaacggcattaaacagagggaaacagacccgggattccgtcacccgggcggggggataaggacg
gctttgagagcagacaggaaaagggagcttttctgcatggggtgaaaaaattatttattgaaggaggaggaggcggc
agcggaggaaggggaggggcgggaggaggaggaagagccggccgcccccgccccggccccggctcctcaggagccaa
gggcagcctcgccaggtcggtcccgggctcgaggaccgcggctggggtcgaggggctcagtctcccacgtgaccggc
tgggcgcgccccgccagacccggcctcgggattccctcctcccggcgagtctccgcccgccccgtcctggaggtggg
gagaaggagggcggggcgggggggacggaaactctccccgccaaatcctggccccaggcctggggacactcgcggcg
ggaagatttggaggggaggggagggggaggggcgtgggggcgcggcctcgctggagtccccctgaccccccgacccc
cgcccaccggcctgggcgtcctcccgcggcccctcctcccctcccggcgcccggtgctctggggcgcgtgccacgcc
tggctcggcgccgtaggggcccccgcaggtagagacccctggaaatggcctcgacgccgcaggagcgaggcggccac
caccccgctaatccgggcacgtctctccaggccgaggcctgcggtggaaaagccggggttccatttgtgctgagtcg
gggcggccgaatggagccaggcctcgggacgcgggacggacgggctctggccgcgcaccttcgcgggctctgcagcg
cccgaccgcctcccccggcagggaggaggcgcttgtggggggcacccacggggcacagtgatccctgggggtctgcg
gacctcctgggccccgcagcagacacgagtttagcctttgggtttagtttaaatcacataagggtgtcgtgcaatcg
atttatggtttctacacaccagacactttaacctccaaccccccccatccaagccaacaagaaaatgcggtgccgtg
ttggcagctgagctgcgcccgaagagacgcagggagacgtaagagaggaaagtgtgagtggccggggggcctccccc
cgtcagaagtcgcgcagtcgcgcccataaaacgccccctccgggcggctagggcaggtgagcgcgtccccgggcctc
cccacgccggcccctgccacagagccgtctaggtcgagcagatatttacagaataaaaatgacaataactcgacgtc
ccgggacggccacgcaatctgttagtaatttagcgggatgggaatttcctttctagggcctgccagtgaagcgcttt
tccaaatttccacagcgggggaagcctgcgattttacataatgacttcagcatgccgggctttctcgacacccctcc
ccggcccccggcccccgccccccgccccttttccagcagggccgggctccctccggacacccgcgtggactcaggcg
tcccgtctggcccgttcgcccccgtttcccccgccagccccagcgcccccctgcccggcccccggattccccgttcc
cgcccctacgcccccatcccctccccgtgcgcccctccccgtgcgcccccctccccgtgcgccccccctccccgtgc
gcccccctccccgtgcgccccccctccccgggcgcccccctccccgggcgccccccctccccgtgcgcccccccctc
cccgtgcgccccccctccccgtgcgcgccccgcctcttgcgcccctgcccccaggcgagcggctgccgcggcgcggg
gaggggcgggcgctcggcgactcgtccccggggccccgcgcgggcccgggcagcaggggcgtgatgtcacggcaggg
agggggcgcgggagccgccgggccggcggggaggcgggggaggtgttttccagctttaaaaaggcaggaggcagagc
gcggccctgcgtcagagcgagactcagagg
NFATcl Promoter fragment (P3)
(DNA)
(SEQ ID NO: 783)
caggcctggggacactcgcggcgggaagatttggaggggaggggagggggaggggcgtgggggcgcggcctcgctgg
agtccccctgaccccccgacccccgcccaccggcctgggcgtcctcccgcggcccctcctcccctcccggcgcccgg
tgctctggggcgcgtgccacgcctggctcggcgccgtaggggcccccgcaggtagagacccctggaaatggcctcga
cgccgcaggagcgaggcggccaccaccccgctaatccgggcacgtctctccaggccgaggcctgcggtggaaaagcc
ggggttccatttgtgctgagtcggggcggccgaatggagccaggcctcgggacgcgggacggacgggctctggccgc
gcaccttcgcgggctctgcagcgcccgaccgcctcccccggcagggaggaggcgcttgtggggggcacccacggggc
acagtgatccctgggggtctgcggacctcctgggccccgcagcagacacgagtttagcctttgggtttagtttaaat
cacataagggtgtcgtgcaatcgatttatggtttctacacaccagacactttaacctccaaccccccccatccaaag
ccaacaagaaaatgcggtgccgtgttggcagctgagctgcgcccgaagagacgcagggagacgtaagagaggaaagt
gtgagtggccggggggcctccccccgtcagaagtcgcgcagtcgcgcccataaaacgccccctccgggcggctaggg
caggtgagcgcgtccccgggcctccccacgccggcccctgccacaggccgtctaggtcgagcagatatttacagaat
aaaaatgacaataactcgacgtcccgggacggccacgcaatctgttagtaatttagcgggatgggaatttcctttct
agggcctgccagtgaagcgcttttccaaatttccacagcgggggaagcctgcgattttacataatgacttcagcatg
ccgggctttctcgacacccctccccggcccccggcccccgccccccgccccttttccagcagggccgggctccctcc
ggacacccgcgtggactcaggcgtcccgtctggcccgttcgcccccgtttcccccgccagccccagcgcccccctgc
ccggcccccggattccccgttcccgcccctacgcccccatcccctccccgtgcgcccctccccgtgcgcccccctcc
ccgtgcgccccccctccccgtgcgcccccctccccgtgcgccccccctccccgggcgcccccctccccgggcgcccc
ccctccccgtgcgcccccccctccccgtgcgccccccctccccgtgcgcgccccgcctcttgcgcccctgcccccag
gcgagcggctgccgcggcgcggggaggggcgggcgctcggcgactcgtccccggggccccgcgcgggcccgggcagc
aggggcgtgatgtcacggcagggagggggcgcgggagccgccgggccggcggggaggcgggggaggtgttttccagc
tttaaaaaggcaggaggcagagcgcggccctgcgtcagagcgagactcagaggctccgaactcgccggcggagtcgc
cgcgccagatcccagcagcagggcgcgg
pNFAT-MMP9cat-1 gBLOCK sequence
(DNA)
(SEQ ID NO: 784)
aagaggaaaatttgtttcatacagaaggcgttactagttaggcgtgtacggtgggaggcctatataagcagagctcg
tttagtgaaccgtcagatcgcctggagacgccatccacgctgttttgacctccatagaagacaccgggaccgatcca
gcctctcgacattcgtttctagagccaccatgagcctctggcagcccctggtcctggtgctcctggtgctgggctgc
tgctttgctttccaaacctttgagggcgacctcaagtggcaccaccacaacatcacctattggatccaaaactactc
ggaagacttgccgcgggcggtgattgacgacgcctttgcccgcgccttcgcactgtggagcgcggtgacgccgctca
ccttcactcgcgtgtacagccgggacgcagacatcgtcatccagtttggtgtcgcggagcacggagacgggtatccc
ttcgacgggaaggacgggctcctggcacacgcctttcctcctggccccggcattcagggagacgcccatttcgacga
tgacgagttgtggtccctgggcaagggcgtcgtggttccaactcggtttggaaacgcagatggcgcggcctgccact
tccccttcatcttcgagggccgctcctactctgcctgcaccaccgacggtcgctccgacggcttgccctggtgcagt
accacggccaactacgacaccgacgaccggtttggcttctgccccagcgagagactctacacccaggacggcaatgc
tgatgggaaaccctgccagtttccattcatcttccaaggccaatcctactccgcctgcaccacggacggtcgctccg
acggctaccgctggtgcgccaccaccgccaactacgaccgggacaagctcttcggcttctgcccgacccgagctgac
tcg
NFAT consensus sequence:
(SEQ ID NO: 804)
(A/T)GGAAA(A/N)(A/T/C)N
Current NFAT RE (Form System Biosciences. The sequence is from the mouse IL2
promoter
(DNA)
(SEQ ID NO: 805)
aagaggaaaatttgtttcatacagaaggcgtt
Mouse IL2 Promoter (highlighted in green the NFAT RE used, highlighted in
yellow is the start codon)
(DNA)
(SEQ ID NO: 806)
aactagagacatataaaataacaccaacatccttagatacaacccttcctgagaatttattggacatcatactcttt
ttaaaaagcataataaacatcaagacacttacacaaaatatgttaaattaaatttaaaacaacaacgacaaaatagt
acctcaagctcaacaagcattttaggtgtccttagcttactatttctctggctaactgtatgaagccatctatcacc
ctgtgtgcaattagctcattgtgtagataagaaggtaaaaccatcttgaaacaggaaaccaatatccttcctgtcta
atcaacaaatctaaaagatttattcttttcatctatctcctcttgcgtttgtccaccacaacaggctgcttacaggt
tcaggatggttttgacaaagagaacattttcatgagttacttttgtgtctccaccccaaagaggaaaatttgtttca
tacagaaggcgttcattgtatgaattaaaactgccacctaagtgtgggctaacccgaccaagagggatttcacctaa
atccattcagtcagtgtatgggggtttaaagaaattccagagagtcatcagaagaggaaaaacaaaaggtaatgctt
tctgccacacaggtagactctttgaaaatatgtgtaatatgtaaaacatcgtgacacccccatattatttttccagc
attaacagtataaattgcctcccatgctgaagagctgcctatcacccttgctaatcactcctcacagtgacctcaag
tcctgcaggcatgtacagcatgcagctcgcatcctgtgtcac
NFAT RE (Form PRomega. The sequence is from the humane IL2 promoter
(DNA)
(SEQ ID NO: 807)
ggaggaaaaactgtttcatacagaaggcgt
Possible NFAT RE from ET-1 promoter
(DNA)
(SEQ ID NO: 808)
tccagggaaaatcggagtagaacaagagggatg
Possible NFAT RE from ET-1 promoter
(DNA)
(SEQ ID NO: 809)
actgttggaaaacgtaaacacgttattaaacggt
Possible NFAT RE from human CD3y
(DNA)
(SEQ ID NO: 810)
tccttaacggaaaaacaaaa
Possible NFAT RE from human CD3y
(DNA)
(SEQ ID NO: 811)
aaaggaaaaagtatatgttc
Possible NFAT RE from human IL3 promoter
(DNA)
(SEQ ID NO: 812)
atgccatggaaagggtg
Possible NFAT RE from human GPC6
(DNA)
(SEQ ID NO: 813)
aaggggaaatgttgagtctaga
Possible NFAT RE from human growth hormone-releasing hormone
(SEQ ID NO: 814)
(DNA)
AACTTGGAAAAGCATAG
(DNA)
(SEQ ID NO: 815)
ttatgccgtotagaggagacatactttotactcaaagotacacacatagactacaacgatgggaaaagacgacacac
caacagogacttcaggaaagotggagtggctgotaatgttagacaaaataggotttttaaaaaaggttttattaaag
aggaatgtttcgtaatgataaaagoactaatotgtgagaaagatacaacaatgataaacatacgtgcagotaataag
agagotocaaaatotatgaagoaaaaactcacagaatgaggggagaagcagttotacaacagagaatggggacttog
atactocactttcaataatggatacaacaaccaggcagataacaaggcaacagaaggcctgaacaacagtataaacc
aattagacctaccagatatotatagotagoacactocacccaacgacagcagaatacacattottotcaagogcaca
agtaacatoctocaggatgggccatgttotaggccatcaaacaaactcaggtggtttgaggccagaggcctotottt
taaccaccacactagggcottoggaggaggcaagcagagagttgtcaaagaggccotcaggactgggtgcagtggct
catgactgtaatoccagoactttagaaggctgaggcacaaggatottttgagotcaggagttcaagaaatgagoact
tatccactgggcgoggtggctcacgccagtaatccagoactttgggaggottaggogggoggatcaagaggtcagaa
gotcaagaccagoctgaccaacatggtgaaaccocgtototactaaaagtacaaaaattagcogggcgtggtggcgc
acacctgtaatoccagotacttgggaggctgaggcaggagaatcacttgaaccogggaggtggaggttgcagtgagt
ggagatcacaccattgoaccocagoctgggcaacagagogagactocgtotcaaaaaaaaaaaaaaaaaaaaagaaa
gaaagaaaaagaaaaaaaaagtgagcatgtattttgocagagtotggagattagaattaaattagoaaaccagaatt
atagaaaaagotatttacttttaagtaaacagotgagatttttttttttaagtcagtgtgaatgaagotcacagcca
tggttggagotgagaaagaaggatttccotttagttatgoacctgtgtcagoaccttotgactttocttotaaagto
tggggtgttoctgaggatccgtaagtttggggttcagggtttotacagcatgotgttacttgtgaaacatctottta
accatgtoccagagttgoccaggagtttaagaccagoctgagoaacatagoaagacctcatotcaacaacaacaaaa
attagaaataaattagccaggtgtggtgacatgtgoctgtagtoccagotactcagaaggctgaggcatgaggatca
ottgggoccaggaagttggggctgcagggagocctgttcatgccgotgoactocagoctgoaagacagagcagaaaa
aaagaatcaggatoctgggcagagggaggagaggggaccggggtocagoaagoacttggggattgactgaatggcgt
tggggagagatgactocaaagtoctggagtgggtgagaatgactgogagtggottttaggtggggaggttoctgoct
ggccactcogggaggggacgtggggctgaagggtatcaggtgccgtgotgagcagtttggccttgatcotaatgocc
tggacacacgtotagggtaggaaagttgactgatccattggtgatotgagtttttagacatggtggtagtocatgag
gtgggtgttcatgotaagagtttagacagggaaacctatgaagccottagoaaccotocagggaaggggcgtggtta
aagagatgtttcataagtaacagcatggtatagaaactotgaaccocaaatgtatgggtoctcaggaacaccocaga
otttagaaggaaagtcagaaggtgotgacacgggtgtataactaaagggaaatcottotttotcagotocaaccatg
gotgtgaggttcattcacactgacttaaaaaaaaaaatotcagtttacttaaaagtaaatagotttttotataatto
tggtttgotaatttaatoctagtotocagaccotggctaaataaatgoccatttotocagatggtotcaagagtoto
tggacatcgtgggggccottocctgttggttggaaggtgoctcaggaagaagggggtggattotgagttgagtcaaa
acctcaaagaccoctgatgggaaaagototcaagtgaccaccgotgtgggccagaatgoaaaactgcaggaacagaa
cattcgcaggaacagaacacagtogtattaagtgattttoccgagcaggaagtggcatotggcctgoggttcagtag
ggggaggaaagggtgggcgoacctgoccotggctggcgoacctgocaggtagoccoacgoggcaccgcgtgtgccga
gogoccotgaggatggaaagoccoacgoggggcaggtggcaccoaccotocgaagacgggacgggatggagogttga
gottoggggcagotcoggccoggccogcgotggagacgccogcatotgocaggatggcgtotcatagocctggtgot
cacacatgacgccaggaagocccagoaacagtgaccgcccaggctotagaaaatattggacggggtggatgaacacc
caagtgcgctocaggagaagggatttggcaccocaaggggcttttaaaacggtaagottotaggggtgtotttgocc
ccaataatccatagaaacaacagtcatotaaaaatagtottgttttotgtoctaagotocttttaactttgttagto
atcaccaatoctaaaataaaaccogtgtaacgtotoccotagtagoggctataaacaaacctacgaggaggcaggag
gaagaggaaaggggcgcagggcgctoggggagcagagcogggggccogoggtggccgcagaggcogggcoggggcgc
agaggcogggcgagotggccgcgctotgggccgccgoctcoggaactocctgogoctggcgcgoggccaccgtggto
coggcaacggcattaaacagagggaaacagaccogggattocgtoaccogggoggggggataaggacggotttgaga
gcagacaggaaaagggagottttotgcatggggtgaaaaaattatttattgaaggaggaggaggcggcagoggagga
aggggagggyogggaggaggaggaagagcoggccgccoccgoccoggoccoggctoctcaggagccaagggcagoct
cgccaggtoggtocogggctogaggaccgoggctggggtogaggggctcagtotoccacgtgacoggctgggcgcgc
occgccagaccoggcctogggattocctoctoccggcgagtotocgoccgoccogtoctggaggtggggagaaggag
ggoggggogggggggacggaaactotoccogccaaatoctggccocaggcctggggacactogoggogggaagattt
ggaggggaggggagggggaggggcgtgggggcgoggcctogotggagtoccoctgaccoccogaccoccgccoaccg
gcctgggcgtcctcccgcggcccctcctcccctcccggcgcccggtgctctggggcgcgtgccacgcctggctcggc
gccgtaggggcccccgcaggtagagacccctggaaatggcctcgacgccgcaggagcgaggcggccaccaccccgct
aatccgggcacgtctctccaggccgaggcctgcggtggaaaagccggggttccatttgtgctgagtcggggcggccg
aatggagccaggcctcgggacgcgggacggacgggctctggccgcgcaccttcgcgggctctgcagcgcccgaccgc
ctcccccggcagggaggaggcgcttgtggggggcacccacggggcacagtgatccctgggggtctgcggacctcctg
ggccccgcagcagacacgagtttagcctttgggtttagtttaaatcacataagggtgtcgtgcaatcgatttatggt
ttctacacaccagacactttaacctccaaccccccccatccaaagccaacaagaaaatgcggtgccgtgttggcagc
tgagctgcgcccgaagagacgcagggagacgtaagagaggaaagtgtgagtggccggggggcctccccccgtcagaa
gtcgcgcagtcgcgcccataaaacgccccctccgggcggctagggcaggtgagcgcgtccccgggcctccccacgcc
ggcccctgccacaggccgtctaggtcgagcagatatttacagaataaaaatgacaataactcgacgtcccgggacgg
ccacgcaatctgttagtaatttagcgggatgggaatttcctttctagggcctgccagtgaagcgcttttccaaattt
ccacagcgggggaagcctgcgattttacataatgacttcagcatgccgggctttctcgacacccctccccggccccc
ggcccccgccccccgccccttttccagcagggccgggctccctccggacacccgcgtggactcaggcgtcccgtctg
gcccgttcgcccccgtttcccccgccagccccagcgcccccctgcccggcccccggattccccgttcccgcccctac
gcccccatcccctccccgtgcgcccctccccgtgcgcccccctccccgtgcgccccccctccccgtgcgcccccctc
cccgtgcgccccccctccccgggcgcccccctccccgggcgccccccctccccgtgcgcccccccctccccgtgcgc
cccccctccccgtgcgcgccccgcctcttgcgcccctgcccccaggcgagcggctgccgcggcgcggggaggggcgg
gcgctcggcgactcgtccccggggccccgcgcgggcccgggcagcaggggcgtgatgtcacggcagggagggggcgc
gggagccgccgggccggcggggaggcgggggaggtgttttccagctttaaaaaggcaggaggcagagcgcggccctg
cgtcagagcgagactcagaggctccgaactcgccggcggagtcgccgcgccagatcccagcagcagggcgcgggcac
cggggcgcgggcagggctcggagccaccgcgcaggtcctagggccgcggccgggccccgccacgcgcgcacacgccc
ctcgatg
NFATc3 promoter sequence
(DNA)
(SEQ ID NO: 816)
gcagccaggcagggtgggcgcgcgtagggggcggggccgggcgcgcggcagggcgcgagagcgcacccgcggcggcg
gtggcggcgactgtgggggggcggcggggaacattggctaagccgacagtggaggcttaggcaccggtggcgggcgg
ctgcggttcctggtgctgctcggcgcgcggccagctttcggaacggaacgctcggcgtcgcgggccccgcccggaaa
gtttgccgtggagtcgcgacctcttggcccgcgcggcccggcatgaagcggcgttgaggagctgctgccgccgcttg
ccgctgccgccgccgccgcctgaggaggagctgcagcaccctgggccacgccg
NFATc2 promoter sequence 1
(DNA)
(SEQ ID NO: 817)
cagagagaggctgcgttcagactggggcactgccatcccctccgcatca
tggggtctgtggaccaaggtaactgactctcgatcccttccagccttttccgctcgctcctcccggccctttcctgc
tgctcccgtcccgggcagcactttcagctcccggcagaggtcggtgcgggaggcctggggaccccgctcgccctcgg
cgcacaggtagcggggcccgcggaggggcgcccgcgccccggccagggaagggacacttgggaaggcgactttggac
aactttacgcgggggcagggaagtgtcccaggccgggattccctaggccagtctgtcgggaggattttcctctccac
gggacaccgggagggattctcgctactaaccgctggctgtttaaccgtttcagcactcggcttttgacagcaa
NFATc2 promoter sequence 2
(DNA)
(SEQ ID NO: 818)
catcatggggtctgtggaccaaggtaactgactctcgatcccttccagccttttccgctcgctc
NFATcl response element consensus
(DNA)
(SEQ ID NO: 819)
cattttttccat
NFATcl response element consensus
(DNA)
(SEQ ID NO: 820)
tttttcca
NFAT response elements contained within the Foxp3 enhancer region
(DNA)
(SEQ ID NO: 821)
acttgaaaatgagataaatgttcacctatgttggcttctagtctcttttatggcttcatt
ttttccatttactatagaggttaagagtgtgggtactggagccagactgtctgggacaa
N+20
(SEQ ID NO: 822)
SNIKFRPGSVVVQLTLAFREGTINVHDVETQFNQYKTEAASRYNLTISDVSVSDVPFPFSAQSGA
N+20/C-27
(SEQ ID NO: 823)
SNIKFRPGSVVVQLTLAFREGTINVHDVETQFNQYKTE
N+9/C-9
(SEQ ID NO: 824)
VQLTLAFREGTINVHDVETQFNQYKTEAASRYNLTISDVSVSDVP
C-10
(SEQ ID NO: 825)
GTINVHDVETQFNQYKTEAASRYNLTISDVSVSDV
NME7-AB
(DNA)
(SEQ ID NO: 826)
atggaaaaaacgctggccctgattaaaccggatgcaatctccaaagctggcgaaattatcgaaattatcaacaaagc
gggtttcaccatcacgaaactgaaaatgatgatgctgagccgtaaagaagccctggattttcatgtcgaccaccagt
ctcgcccgtttttcaatgaactgattcaattcatcaccacgggtccgattatcgcaatggaaattctgcgtgatgac
gctatctgcgaatggaaacgcctgctgggcccggcaaactcaggtgttgcgcgtaccgatgccagtgaatccattcg
cgctctgtttggcaccgatggtatccgtaatgcagcacatggtccggactcattcgcatcggcagctcgtgaaatgg
aactgtttttcccgagctctggcggttgcggtccggcaaacaccgccaaatttaccaattgtacgtgctgtattgtc
aaaccgcacgcagtgtcagaaggcctgctgggtaaaattctgatggcaatccgtgatgctggctttgaaatctcggc
catgcagatgttcaacatggaccgcgttaacgtcgaagaattctacgaagtttacaaaggcgtggttaccgaatatc
acgatatggttacggaaatgtactccggtccgtgcgtcgcgatggaaattcagcaaaacaatgccaccaaaacgttt
cgtgaattctgtggtccggcagatccggaaatcgcacgtcatctgcgtccgggtaccctgcgcgcaatttttggtaa
aacgaaaatccagaacgctgtgcactgtaccgatctgccggaagacggtctgctggaagttcaatactttttcaaaa
ttctggataatctcgagcaccaccaccaccaccactga
NME7-AB
(amino acids)
(SEQ ID NO: 827)
MEKTLALIKPDAISKAGEITEIINKAGFTITKLKMMMLSRKEALDFHVDHQSRPFFNELIQFITTGPIIAMEILRDD
AICEWKRLLGPANSGVARTDASESIRALFGTDGIRNAAHGPDSFASAAREMELFFPSSGGCGPANTAKFTNCTCCIV
KPHAVSEGLLGKILMAIRDAGFEISAMQMFNMDRVNVEEFYEVYKGVVTEYHDMVTEMYSGPCVAMEIQQNNATKTF
REFCGPADPEIARHLRPGTLRAIFGKTKIQNAVHCTDLPEDGLLEVQYFFKILDNLEHHHHHH
Human NME7 xl
(DNA)
(SEQ ID NO: 828)
atgatgatgctttcaaggaaagaagcattggattttcatgtagatcaccagtcaagaccctttttcaatgagctgat
ccagtttattacaactggtcctattattgccatggagattttaagagatgatgctatatgtgaatggaaaagactgc
tgggacctgcaaactctggagtggcacgcacagatgcttctgaaagcattagagccctctttggaacagatggcata
agaaatgcagcgcatggccctgattcttttgcttctgcggccagagaaatggagttgttttttccttcaagtggagg
ttgtgggccggcaaacactgctaaatttactaattgtacctgttgcattgttaaaccccatgctgtcagtgaaggac
tgttgggaaagatcctgatggctatccgagatgcaggttttgaaatctcagctatgcagatgttcaatatggatcgg
gttaatgttgaggaattctatgaagtttataaaggagtagtgaccgaatatcatgacatggtgacagaaatgtattc
tggcccttgtgtagcaatggagattcaacagaataatgctacaaagacatttcgagaattttgtggacctgctgatc
ctgaaattgcccggcatttacgccctggaactctcagagcaatctttggtaaaactaagatccagaatgctgttcac
tgtactgatctgccagaggatggcctattagaggttcaatacttcttcaagatcttggataatctcgagcaccacca
ccaccaccactga
(amino acids)
(SEQ ID NO: 829)
MMMLSRKEALDFHVDHQSRPFFNELIQFITTGPIIAMEILRDDAICEWKRLLGPANSGVARTDASESIRALFGTDGI
RNAAHGPDSFASAAREMELFFPSSGGCGPANTAKFTNCTCCIVKPHAVSEGLLGKILMAIRDAGFEISAMQMFNMDR
VNVEEFYEVYKGVVTEYHDMVTEMYSGPCVAMEIQQNNATKTFREFCGPADPEIARHLRPGTLRAIFGKTKIQNAVH
CTDLPEDGLLEVQYFFKILDNLEHHHHHH*
Mouse Antibody 17H6 Heavy chain: DNA sequence
Signal sequence-FR1-CDR1-FR2-CDR2-FR3-CDR3-FR4
(SEQ ID NO: 830)
ATGAAGTTGTGGCTGAACTGGATTTTCCTTGTAACACTTTTAAATGGTATCCAGTGTGAGGTGAAGCTGGTGGAGTC
TGGAGGAGGCTTGGTACAGCCTGGGGGTTCTCTGAGACTCTCCTGTGCAACTTCTGGGTTCACCTTCACTGATTACT
ACATGAGCTGGGTCCGCCAGCCTCCAAGAAAGGCACTTGAGTGGTTGGGTTTTATTAGAAACAAAGCTAATGGTTAC
ACAGCAGAGTACAGTGCGTCTGTGAAGGGTCGGTTCACCATCTCCAGAGATGTTTCCCAAAACCTCCTCTATCTTCA
AATGAACATCCTGAGAGCTGAGGACAGTGCCACTTATTACTGTGCAAAAGATTACTACGGTAGTAACCCTGCCTGGT
TTGCTTACTGGGGCCAAGGGACTCTGGTCACTGTCTCTGCA
Mouse Antibody 17H6 Heavy chain: Amino acid sequence
Signal peptide-FR1-CDR1-FR2-CDR2-FR3-CDR3-FR4
(SEQ ID NO: 831)
MKLWLNWIFLVTLLNGIQCEVKLVESGGGLVQPGGSLRLSCATSGFTFTDYYMSWVRQPPRKALEWLGFIRNKANGY
TAEYSASVKGRFTISRDVSQNLLYLQMNILRAEDSATYYCAKDYYGSNPAWFAYWGQGTLVTVSA
Mouse 17H6 heavy chain variable framework 1 (FW1) sequence:
(DNA)
(SEQ ID NO: 832)
GAGGTGAAGCTGGTGGAGTCTGGAGGAGGCTTGGTACAGCCTGGGGGTTCTCTGAGACTCTCCTGTGCAACTTCTGG
GTTCACCTTCACT
(amino acids)
(SEQ ID NO: 833)
EVKLVESGGGLVQPGGSLRLSCATSGFTFT
Mouse 17H6 heavy chain variable complementarity determining regions 1 (CDR1)
sequence:
(DNA)
(SEQ ID NO: 834)
GATTACTACATGAGC
(amino acids)
(SEQ ID NO: 835)
DYYMS
Mouse 17H6 heavy chain variable framework 2 (FW2) sequence:
(DNA)
(SEQ ID NO: 836)
GAGGTGAAGCTGGTGGAGTCTGGAGGAGGCTTGGTACAGCCTGGGGGTTCTCTGAGACTCTCCTGTGCAACTTCTGG
GTTCACCTTCACT
(amino acids)
(SEQ ID NO: 837)
WVRQPPRKALEWLG
Mouse 17H6 heavy chain variable complementarity determining regions 2 (CDR2)
sequence:
(DNA)
(SEQ ID NO: 838)
TTTATTAGAAACAAAGCTAATGGTTACACAGCAGAGTACAGTGCGTCTGTGAAGGGT
(amino acids)
(SEQ ID NO: 839)
FIRNKANGYTAEYSASVKG
Mouse 17H6 heavy chain variable framework 3 (FW3) sequence:
(DNA)
(SEQ ID NO: 840)
CGGTTCACCATCTCCAGAGATGTTTCCCAAAACCTCCTCTATCTTCAAATGAACATCCTGAGAGCTGAGGACAGTGC
CACTTATTACTGTGCAAAA
(amino acids)
(SEQ ID NO: 841)
RFTISRDVSQNLLYLQMNILRAEDSATYYCAK
Mouse 17H6 heavy chain variable complementarity determining regions 3 (CDR3)
sequence:
(DNA)
(SEQ ID NO: 842)
GATTACTACGGTAGTAACCCTGCCTGGTTTGCTTAC
(amino acids)
(SEQ ID NO: 1)
DYYGSNPAWFAY
Mouse 17H6 heavy chain variable framework 4 (FW4) sequence:
(DNA)
(SEQ ID NO: 843)
TGGGGCCAAGGGACTCTGGTCACTGTCTCTGCA
(amino acids)
(SEQ ID NO: 1)
WGQGTLVTVSA
Mouse Antibody 17H6 Light chain: DNA sequence
Signal sequence-FR1-CDR1-FR2-CDR2-FR3-CDR3-FR4
(SEQ ID NO: 844)
ATGAAGTTGCCTGTGAGGCTGTTGGTGCTGATGTTCTGGATTCCTGCTTCCAACAGTGATATTTTGATGACCCAGAC
TCCACTCTCCCTGCCTGTCAGTCTTGGAGATCAAGCCTCCATCTCTTGCAGATCTAGTCAGAGCATTGTACATAGTA
GTGGAAACACCTTTTTAGAATGGTACCTGCAGAAACCTGGCCAGTCTCCAAAGCTCCTGATCTACAAAGTTTCCAAC
CGATTTTCTGGGGTCCCAGACAGGTTCAGTGGCAGTGGATCAGGGATAGATTTCACACTCAAGATCAGCAGAGTGGA
GGCTGAGGATCTGGGAGTTTATTACTGCTTTCAAGGTTCACATGTTCCTTTCACGTTCGGCTCGGGGACAAAGTTGG
AAATAAAA
Mouse Antibody 17H6 Light chain: Amino acid sequence
Signal peptide-FR1-CDR1-FR2-CDR2-FR3-CDR3-FR4
(SEQ ID NO: 845)
MKLPVRLLVLMFWIPASNSDILMTQTPLSLPVSLGDQASISCRSSQSIVHSSGNTFLEWYLQKPGQSPKLLIYKVSN
RFSGVPDRFSGSGSGIDFTLKISRVEAEDLGVYYCFQGSHVPFTFGSGTKLEIK
Mouse 17H6 light chain variable framework 1 (FW1) sequence:
(DNA)
(SEQ ID NO: 846)
GATATTTTGATGACCCAGACTCCACTCTCCCTGCCTGTCAGTCTTGGAGATCAAGCCTCCATCTCTTGC
(amino acids)
(SEQ ID NO: 847)
DILMTQTPLSLPVSLGDQASISC
Mouse 17H6 light chain variable complementarity determining regions 1 (CDR1)
sequence:
(DNA)
(SEQ ID NO: 848)
AGATCTAGTCAGAGCATTGTACATAGTAGTGGAAACACCTTTTTAGAA
(amino acids)
(SEQ ID NO: 849)
RSSQSIVHSSGNTFLE
Mouse 17H6 light chain variable framework 2 (FW2) sequence:
(DNA)
(SEQ ID NO: 850)
TGGTACCTGCAGAAACCTGGCCAGTCTCCAAAGCTCCTGATCTAC
(amino acids)
(SEQ ID NO: 851)
WYLQKPGQSPKLLIY
Mouse 17H6 light chain variable complementarity determining regions 2 (CDR2)
sequence:
(DNA)
(SEQ ID NO: 852)
AAAGTTTCCAACCGATTTTCT
(amino acids)
(SEQ ID NO: 853)
KVSNRFS
Mouse 17H6 light chain variable framework 3 (FW3) sequence:
(DNA)
(SEQ ID NO: 854)
GGGGTCCCAGACAGGTTCAGTGGCAGTGGATCAGGGATAGATTTCACACTCAAGATCAGCAGAGTGGAGGCTGAGGA
TCTGGGAGTTTATTACTGC
(amino acids)
(SEQ ID NO: 855)
GVPDRFSGSGSGIDFTLKISRVEAEDLGVYYC
Mouse 17H6 light chain variable complementarity determining regions 3 (CDR3)
sequence:
(DNA)
(SEQ ID NO: 856)
TTTCAAGGTTCACATGTTCCTTTCACG
(amino acids)
(SEQ ID NO: 857)
FQGSHVPFT
Mouse 17H6 light chain variable framework 4 (FW4) sequence:
(DNA)
(SEQ ID NO: 858)
TTCGGCTCGGGGACAAAGTTGGAAATAAAA
(amino acids)
(SEQ ID NO: 859)
FGSGTKLEIK
Mouse antibody 39H5 Heavy chain: DNA sequence
Signal sequence-FR1-CDR1-FR2-CDR2-FR3-CDR3-FR4
(SEQ ID NO: 860)
ATGGCTTGGGTGTGGACCTTGCTATTCCTGATGGCAGCTGCCCAAAGTGCCCAAGCACAGATCCAGTTGGTGCAGTC
TGGACCTGAGCTGAAGAAGCCTGGAGAGACAGTCAAGATCTCCTGCAAGGCTTCTGGGTATACCTTCACAAACTATG
GAATGAACTGGGTGAAGCAGGCTCCAGGAAAGGGTTTAAAGTGGATGGGCTGGATAAACACCTACACTGGAGAGCCA
ACATATGTTGGTGACTTCAAGGGACGGTTTGCCTTCTCTTTGGAGACCTCTGCCAGCACTGCCTATTTGCAGATCAA
CAACCTCAAAAATGAGGACACGGCTACATATTTTTGTGTTAGAGGTATCCACGGCTACGTGGACTACTGGGGCCAAG
GCACCACTCTCACAGTCTCCTCA
Mouse antibody 39H5 Heavy chain: Amino acid sequence
Signal peptide-FR1-CDR1-FR2-CDR2-FR3-CDR3-FR4
(SEQ ID NO: 861)
MAWVWTLLFLMAAAQSAQAQIQLVQSGPELKKPGETVKISCKASGYTFTNYGMNWVKQAPGKGLKWMGWINTYTGEP
TYVGDFKGRFAFSLETSASTAYLQINNLKNEDTATYFCVRGIHGYVDYWGQGTTLTVSS
Mouse antibody 39H5 heavy chain variable framework 1 (FW1) sequence:
(DNA)
(SEQ ID NO: 862)
CAGATCCAGTTGGTGCAGTCTGGACCTGAGCTGAAGAAGCCTGGAGAGACAGTCAAGATCTCCTGCAAGGCTTCTGG
GTATACCTTCACA
(amino acids)
(SEQ ID NO: 863)
QIQLVQSGPELKKPGETVKISCKASGYTFT
Mouse antibody 39H5 heavy chain variable complementarity determining regions
1 (CDR1) sequence:
(DNA)
(SEQ ID NO: 864)
AACTATGGAATGAAC
(amino acids)
(SEQ ID NO: 865)
NYGMN
Mouse antibody 39H5 heavy chain variable framework 2 (FW2) sequence:
(DNA)
(SEQ ID NO: 866)
TGGGTGAAGCAGGCTCCAGGAAAGGGTTTAAAGTGGATGGGC
(amino acids)
(SEQ ID NO: 867)
WVKQAPGKGLKWMG
Mouse antibody 39H5 heavy chain variable complementarity determining regions
2 (CDR2) sequence:
(DNA)
(SEQ ID NO: 868)
TGGATAAACACCTACACTGGAGAGCCAACATATGTTGGTGACTTCAAGGGA
(amino acids)
(SEQ ID NO: 869)
WINTYTGEPTYVGDFKG
Mouse antibody 39H5 heavy chain variable framework 3 (FW3) sequence:
(DNA)
(SEQ ID NO: 870)
CGGTTTGCCTTCTCTTTGGAGACCTCTGCCAGCACTGCCTATTTGCAGATCAACAACCTCAAAAATGAGGACACGGC
TACATATTTTTGTGTTAGA
(amino acids)
(SEQ ID NO: 871)
RFAFSLETSASTAYLQINNLKNEDTATYFCVR
Mouse antibody 39H5 heavy chain variable complementarity determining regions
3 (CDR3) sequence:
(DNA)
(SEQ ID NO: 872)
GGTATCCACGGCTACGTGGACTAC
(amino acids)
(SEQ ID NO: 873)
GIHGYVDY
Mouse antibody 39H5 heavy chain variable framework 4 (FW4) sequence:
(DNA)
(SEQ ID NO: 874)
TGGGGCCAAGGCACCACTCTCACAGTCTCCTCA
(amino acids)
(SEQ ID NO: 875)
WGQGTTLTVSS
Mouse antibody 39H5 Light chain: DNA sequence
Signal sequence-FR1-CDR1-FR2-CDR2-FR3-CDR3-FR4
(SEQ ID NO: 876)
ATGAAGTTGCCTGTTAGGCTGTTGGTGCTGATGTTCTGGATTCCTGCTTCCAGCAGTGATGTTTTGATGACCCAAAC
TCCACTCTCCCTGCCTGTCAGTCTTGGAGATCAAGCCTCCATCTCTTGCAGATCTAGTCAGAGCATTGTACATAGAA
ATGGAAACACCTATTTAGAATGGTACCTGCAGAAACCAGGCCAGTCTCCAAAGCTCCTGATCTACAAAGTTTCCAAC
CGATTTTCTGGGGTCCCAGACAGGTTCAGTGGCAGTGGATCAGGGACAGATTTCACACTCAAGATCAGCAGAGTGGA
GGCTGAGGATCTGGGAGTTTATTACTGCTTTCAAGGTTCACATCTTCCGTGGACGTTCGGTGGAGGCACCAAGCTGG
AAATCAAA
Mouse antibody 39H5 Light chain: Amino acid sequence
Signal peptide-FR1-CDR1-FR2-CDR2-FR3-CDR3-FR4
(SEQ ID NO: 877)
MKLPVRLLVLMFWIPASSSDVLMTQTPLSLPVSLGDQASISCRSSQSIVHRNGNTYLEWYLQKPGQSPKLLIYKVSN
RFSGVPDRFSGSGSGTDFTLKISRVEAEDLGVYYCFQGSHLPWTEGGGTKLEIK
Mouse antibody 39H5 light chain variable framework 1 (FW1) sequence:
(DNA)
(SEQ ID NO: 878)
GATGTTTTGATGACCCAAACTCCACTCTCCCTGCCTGTCAGTCTTGGAGATCAAGCCTCCATCTCTTGC
(amino acids)
(SEQ ID NO: 879)
DVLMTQTPLSLPVSLGDQASISC
Mouse antibody 39H5 light chain variable complementarity determining regions
1 (CDR1) sequence:
(DNA)
(SEQ ID NO: 880)
AGATCTAGTCAGAGCATTGTACATAGAAATGGAAACACCTATTTAGAA
(amino acids)
(SEQ ID NO: 881)
RSSQSIVHRNGNTYLE
Mouse antibody 39H5 light chain variable framework 2 (FW2) sequence:
(DNA)
(SEQ ID NO: 882)
TGGTACCTGCAGAAACCAGGCCAGTCTCCAAAGCTCCTGATCTAC
(amino acids)
(SEQ ID NO: 883)
WYLQKPGQSPKLLIY
Mouse antibody 39H5 light chain variable complementarity determining regions
2 (CDR2) sequence:
(DNA)
(SEQ ID NO: 884)
AAAGTTTCCAACCGATTTTCT
(amino acids)
(SEQ ID NO: 885)
KVSNRFS
Mouse antibody 39H5 light chain variable framework 3 (FW3) sequence:
(DNA)
(SEQ ID NO: 886)
GGGGTCCCAGACAGGTTCAGTGGCAGTGGATCAGGGACAGATTTCACACTCAAGATCAGCAGAGTGGAGGCTGAGGA
TCTGGGAGTTTATTACTGC
(amino acids)
(SEQ ID NO: 887)
GVPDRFSGSGSGTDFTLKISRVEAEDLGVYYC
Mouse antibody 39H5 light chain variable complementarity determining regions
3 (CDR3) sequence:
(DNA)
(SEQ ID NO: 888)
TTTCAAGGTTCACATCTTCCGTGGACG
(amino acids)
(SEQ ID NO: 889)
FQGSHLPWT
Mouse antibody 39H5 light chain variable framework 4 (FW4) sequence:
(DNA)
(SEQ ID NO: 890)
TTCGGTGGAGGCACCAAGCTGGAAATCAAA
(amino acids)
(SEQ ID NO: 891)
FGGGTKLEIK
Antibody 3C5 Heavy chain: DNA sequence
Signal sequence-FR1-CDR1-FR2-CDR2-FR3-CDR3-FR4
(SEQ ID NO: 892)
ATGGCTTGGGTGTGGACCTTGCTGTTCCTGATGGCAGCTGCCCAAAGTGCCCAAGCACAGATCCAGTTGGTGCAGTC
TGGACCTGAGCTGAAGAAGCCTGGAGAGACAGTCAAGATCTCCTGCAAGGCTTCTGGGTATACCTTCACAAACTATG
GAATGAACTGGGTGAAGCAGGCTCCAGGAAAGGGTTTAAAGTGGATGGGCTGGATAAACACCTACACTGGAAAGCCA
ACATATGCTGATGACTTCAAGGGACGGTTTGCCTTCTCTTTGGAGACCTCTGCCAGCACTGCCTATTTGCAGATCAA
CAACCTCAAAAATGAGGACACGGCTACATATTTCTGTGCAAGAGGGGGACTAGATGGTTACTACGGCTACTGGGGCC
AAGGCACCACTCTCACAGTCTCCTCA
Antibody 3C5 Heavy chain: Amino acid sequence
Signal peptide-FR1-CDR1-FR2-CDR2-FR3-CDR3-FR4
(SEQ ID NO: 893)
MAWVWTLLFLMAAAQSAQAQIQLVQSGPELKKPGETVKISCKASGYTFTNYGMNWVKQAPGKGLKWMGWINTYTGKP
TYADDFKGRFAFSLETSASTAYLQINNLKNEDTATYFCARGGLDGYYGYWGQGTTLTVSS
Mouse antibody 3C5 heavy chain variable framework 1 (FW1) sequence:
(DNA)
(SEQ ID NO: 894)
CAGATCCAGTTGGTGCAGTCTGGACCTGAGCTGAAGAAGCCTGGAGAGACAGTCAAGATCTCCTGCAAGGCTTCTGG
GTATACCTTCACA
(amino acids)
(SEQ ID NO: 895)
QIQLVQSGPELKKPGETVKISCKASGYTFT
Mouse antibody 3C5 heavy chain variable complementarity determining regions 1
(CDR1) sequence:
(DNA)
(SEQ ID NO: 896)
AACTATGGAATGAAC
(amino acids)
(SEQ ID NO: 897)
NYGMN
Mouse antibody 3C5 heavy chain variable framework 2 (FW2) sequence:
(DNA)
(SEQ ID NO: 898)
TGGGTGAAGCAGGCTCCAGGAAAGGGTTTAAAGTGGATGGGC
(amino acids)
(SEQ ID NO: 899)
WVKQAPGKGLKWMG
Mouse antibody 3C5 heavy chain variable complementarity determining regions 2
(CDR2) sequence:
(DNA)
(SEQ ID NO: 900)
TGGATAAACACCTACACTGGAAAGCCAACATATGCTGATGACTTCAAGGGA
(amino acids)
(SEQ ID NO: 901)
WINTYTGKPTYADDFKG
Mouse antibody 3C5 heavy chain variable framework 3 (FW3) sequence:
(DNA)
(SEQ ID NO: 902)
CGGTTTGCCTTCTCTTTGGAGACCTCTGCCAGCACTGCCTATTTGCAGATCAACAACCTCAAAAATGAGGACACGGC
TACATATTTCTGTGCAAGA
(amino acids)
(SEQ ID NO: 903)
RFAFSLETSASTAYLQINNLKNEDTATYFCAR
Mouse antibody 3C5 heavy chain variable complementarity determining regions 3
(CDR3) sequence:
(DNA)
(SEQ ID NO: 904)
GGGGGACTAGATGGTTACTACGGCTAC
(amino acids)
(SEQ ID NO: 905)
GGLDGYYGY
Mouse antibody 3C5 heavy chain variable framework 4 (FW4) sequence:
(DNA)
(SEQ ID NO: 906)
TGGGGCCAAGGCACCACTCTCACAGTCTCCTCA
(amino acids)
(SEQ ID NO: 907)
WGQGTTLTVSS
Antibody 3C5 Light chain: DNA sequence (393 bp)
Signal sequence-FR1-CDR1-FR2-CDR2-FR3-CDR3-FR4
(SEQ ID NO: 908)
ATGAGTCCTGCCCAGTTCCTGTTTCTGCTAGTGCTCTCGATTCAGGAAACCAACGGTGATGTTGTGATGGCTCAGAC
CCCACTCACTTTGTCGGTTACCATTGGACAACCAGCCTCCATCTCTTGCAAATCAAGTCAGAGCCTCTTACATAGTA
AAGGAAAGACATATTTGAATTGGTTATTACAGAGGCCAGGCCAGTCTCCAAAGCTCCTAATCTATCTGGTGTCTAAA
CTGGAATCTGGAGTCCCTGACAGGTTCAGTGGCAGTGGATCAGGGACAGATTTCACACTGAAAATCAGCAGAGTGGA
GGCTGAAGATTTGGGAGTTTATTACTGCTTGCAAACTACACATTTTCCGTGGACGTTCGGTGGAGGCACCAAGCTGG
AAATCAAA
Antibody 3C5 Light chain: Amino acid sequence (131 aa)
Signal peptide-FR1-CDR1-FR2-CDR2-FR3-CDR3-FR4
(SEQ ID NO: 909)
MSPAQFLFLLVLSIQETNGDVVMAQTPLTLSVTIGQPASISCKSSQSLLHSKGKTYLNWLLQRPGQSPKLLIYLVSK
LESGVPDRFSGSGSGTDFTLKISRVEAEDLGVYYCLQTTHFPWTFGGGTKLEIK
Mouse antibody 3C5 light chain variable framework 1 (FW1) sequence:
(DNA)
(SEQ ID NO: 910)
GATGTTGTGATGGCTCAGACCCCACTCACTTTGTCGGTTACCATTGGACAACCAGCCTCCATCTCTTGC
(amino acids)
(SEQ ID NO: 911)
DVVMAQTPLTLSVTIGQPASISC
Mouse antibody 39H5 light chain variable complementarity determining regions
1 (CDR1) sequence:
(DNA)
(SEQ ID NO: 912)
AAATCAAGTCAGAGCCTCTTACATAGTAAAGGAAAGACATATTTGAAT
(amino acids)
(SEQ ID NO: 913)
KSSQSLLHSKGKTYLN
Mouse antibody 3C5 light chain variable framework 2 (FW2) sequence:
(DNA)
(SEQ ID NO: 914)
TGGTTATTACAGAGGCCAGGCCAGTCTCCAAAGCTCCTAATCTAT
(amino acids)
(SEQ ID NO: 915)
WLLQRPGQSPKLLIY
Mouse antibody 3C5 light chain variable complementarity determining regions 2
(CDR2) sequence:
(DNA)
(SEQ ID NO: 916)
CTGGTGTCTAAACTGGAATCT
(amino acids)
(SEQ ID NO: 917)
LVSKLES
Mouse antibody 3C5 light chain variable framework 3 (FW3) sequence:
(DNA)
(SEQ ID NO: 918)
GGAGTCCCTGACAGGTTCAGTGGCAGTGGATCAGGGACAGATTTCACACTGAAAATCAGCAGAGTGGAGGCTGAAGA
TTTGGGAGTTTATTACTGC
(amino acids)
(SEQ ID NO: 919)
GVPDRFSGSGSGTDFTLKISRVEAEDLGVYYC
Mouse antibody 3C5 light chain variable complementarity determining regions 3
(CDR3) sequence:
(DNA)
(SEQ ID NO: 920)
TTGCAAACTACACATTTTCCGTGGACG
(amino acids)
(SEQ ID NO: 921)
LQTTHFPWT
Mouse antibody 3C5 light chain variable framework 4 (FW4) sequence:
(DNA)
(SEQ ID NO: 922)
TTCGGTGGAGGCACCAAGCTGGAAATCAAA
(amino acids)
(SEQ ID NO: 923)
FGGGTKLEIK
Mouse antibody 8A9 Heavy chain: DNA sequence (420 bp)
Signal sequence-FR1-CDR1-FR2-CDR2-FR3-CDR3-FR4
(SEQ ID NO: 924)
ATGAAGTTGTGGCTGAACTGGATTTTCCTTGTAACACTTTTAAATGGTATCCAGTGTGAGGTGGAGCTGGTGGAGTC
TGGAGGAGGCTTGGTACAGCCTGGGGGTTCTCTGAGACTCTCCTGTGCAACTTCTGGGTTCACCTTCACTGATCACT
ACATGAGCTGGGTCCGCCAGCCTCCAGGAAAGGCACTTGAGTGGTTGGGATTTATTAGAAACAAAGCTAATGGTTAC
ACAACAGAGTACAGTGCATCTGTGAAGGGTCGGTTCACCATCTCCAGAGATAATTCCCAAAGCATCCTCTATCTTCA
AATGAAAACCCTGAGAACTGAGGACAGTGCCACTTATTACTGTGCAAGACCTTCTGACTGGGACTCCTGGTTTGCTT
ACTGGGGCCAAGGGACTCTGGTCACTGTCTCTGCA
Mouse antibody 8A9 Heavy chain: Amino acid sequence (140 aa)
Signal peptide-FR1-CDR1-FR2-CDR2-FR3-CDR3-FR4
(SEQ ID NO: 925)
MKLWLNWIFLVTLLNGIQCEVELVESGGGLVQPGGSLRLSCATSGFTFTDHYMSWVRQPPGKALEWLGFIRNKANGY
TTEYSASVKGRFTISRDNSQSILYLQMKTLRTEDSATYYCARPSDWDSWFAYWGQGTLVTVSA
Mouse antibody 8A9 heavy chain variable framework 1 (FW1) sequence:
(DNA)
(SEQ ID NO: 926)
GAGGTGGAGCTGGTGGAGTCTGGAGGAGGCTTGGTACAGCCTGGGGGTTCTCTGAGACTCTCCTGTGCAACTTCTGG
GTTCACCTTCACT
(amino acids)
(SEQ ID NO: 927)
EVELVESGGGLVQPGGSLRLSCATSGFTFT
Mouse antibody 8A9 heavy chain variable complementarity determining regions 1
(CDR1) sequence:
(DNA)
(SEQ ID NO: 928)
GATCACTACATGAGC
(amino acids)
(SEQ ID NO: 929)
DHYMS
Mouse antibody 8A9 heavy chain variable framework 2 (FW2) sequence:
(DNA)
(SEQ ID NO: 930)
TGGGTCCGCCAGCCTCCAGGAAAGGCACTTGAGTGGTTGGGA
(amino acids)
(SEQ ID NO: 931)
WVRQPPGKALEWLG
Mouse antibody 8A9 heavy chain variable complementarity determining regions 2
(CDR2) sequence:
(DNA)
(SEQ ID NO: 932)
TTTATTAGAAACAAAGCTAATGGTTACACAACAGAGTACAGTGCATCTGTGAAGGGT
(amino acids)
(SEQ ID NO: 933)
FIRNKANGYTTEYSASVKG
Mouse antibody 8A9 heavy chain variable framework 3 (FW3) sequence:
(DNA)
(SEQ ID NO: 934)
CGGTTCACCATCTCCAGAGATAATTCCCAAAGCATCCTCTATCTTCAAATGAAAACCCTGAGAACTGAGGACAGTGC
CACTTATTACTGTGCAAGA
(amino acids)
(SEQ ID NO: 935)
RFTISRDNSQSILYLQMKTLRTEDSATYYCAR
Mouse antibody 8A9 heavy chain variable complementarity determining regions 3
(CDR3) sequence:
(DNA)
(SEQ ID NO: 936)
CCTTCTGACTGGGACTCCTGGTTTGCTTAC
(amino acids)
(SEQ ID NO: 937)
PSDWDSWFAY
Mouse antibody 8A9 heavy chain variable framework 4 (FW4) sequence:
(DNA)
(SEQ ID NO: 938)
TGGGGCCAAGGGACTCTGGTCACTGTCTCTGCA
(amino acids)
(SEQ ID NO: 939)
WGQGTLVTVSA
Mouse antibody 8A9 Light chain: DNA sequence (393 bp)
Signal sequence-FR1-CDR1-FR2-CDR2-FR3-CDR3-FR4
(SEQ ID NO: 940)
ATGAAGTTGCCTGTTAGGCTGTTGGTGCTGATGTTCTGGATTCCTGCTTCCAGCAGTGATGTTTTGATGACCCAAAC
TCCACTCTCCCTGCCTGTCAGTCTTGGTGATCAAGCCTCCATCTCTTGCAGATCTAGTCAGAGCATTGTACATAGTA
ATGGCAACACCTATTTAGATTGGTACTTGCAGAAACCAGGCCAGTCTCCAAAGCTCCTGATCTACAGAGTTTCCAAC
CGATTTTCTGGGGTCCCAGACAGGTTCAGTGGCAGTGGATCAGGGACAGATTTCACACTCAAGATCAGCAGAGTGGA
GGCTGAGGATCTGGGACTTTATTACTGTTTTCAAGGTTCACATGTTCCGTGGGCGTTCGGTGGAGGCACCAAGCTGG
AAATCAAA
Mouse antibody 8A9 Light chain: Amino acid sequence (131 aa)
Signal peptide-FR1-CDR1-FR2-CDR2-FR3-CDR3-FR4
(SEQ ID NO: 941)
MKLPVRLLVLMFWIPASSSDVLMTQTPLSLPVSLGDQASISCRSSQSIVHSNGNTYLDWYLQKPGQSPKLLIYRVSN
RFSGVPDRFSGSGSGTDFTLKISRVEAEDLGLYYCFQGSHVPWAFGGGTKLEIK
Mouse antibody 8A9 light chain variable framework 1 (FW1) sequence:
(DNA)
(SEQ ID NO: 942)
GATGTTTTGATGACCCAAACTCCACTCTCCCTGCCTGTCAGTCTTGGTGATCAAGCCTCCATCTCTTGC
(amino acids)
(SEQ ID NO: 943)
DVLMTQTPLSLPVSLGDQASISC
Mouse antibody 8A9 light chain variable complementarity determining regions 1
(CDR1) sequence:
(DNA)
(SEQ ID NO: 944)
AGATCTAGTCAGAGCATTGTACATAGTAATGGCAACACCTATTTAGAT
(amino acids)
(SEQ ID NO: 945)
RSSQSIVHSNGNTYLD
Mouse antibody 8A9 light chain variable framework 2 (FW2) sequence:
(DNA)
(SEQ ID NO: 946)
TGGTACTTGCAGAAACCAGGCCAGTCTCCAAAGCTCCTGATCTAC
(amino acids)
(SEQ ID NO: 947)
WYLQKPGQSPKLLIY
Mouse antibody 8A9 light chain variable complementarity determining regions 2
(CDR2) sequence:
(DNA)
(SEQ ID NO: 948)
AGAGTTTCCAACCGATTTTCT
(amino acids)
(SEQ ID NO: 949)
RVSNRFS
Mouse antibody 8A9 light chain variable framework 3 (FW3) sequence:
(DNA)
(SEQ ID NO: 950)
GGGGTCCCAGACAGGTTCAGTGGCAGTGGATCAGGGACAGATTTCACACTCAAGATCAGCAGAGTGGAGGCTGAGGA
TCTGGGACTTTATTACTGT
(amino acids)
(SEQ ID NO: 951)
GVPDRFSGSGSGTDFTLKISRVEAEDLGLYYC
Mouse antibody 8A9 light chain variable complementarity determining regions 3
(CDR3) sequence:
(DNA)
(SEQ ID NO: 952)
TTTCAAGGTTCACATGTTCCGTGGGCG
(amino acids)
(SEQ ID NO: 953)
FQGSHVPWA
Mouse antibody 8A9 light chain variable framework 4 (FW4) sequence:
(DNA)
(SEQ ID NO: 954)
TTCGGTGGAGGCACCAAGCTGGAAATCAAA
(amino acids)
(SEQ ID NO: 955)
FGGGTKLEIK
Mouse antibody 18G12 Heavy chain: DNA sequence (399 bp)
Signal sequence-FR1-CDR1-FR2-CDR2-FR3-CDR3-FR4
(SEQ ID NO: 956)
ATGGGATGGAGCTATATCATCCTCTTTTTGGTCGCAACAGCTACAGGTGTCCACTCCCAGGTCCAACTGCAGCAGTC
TGGGGCTGAACTGGTGAAGCCTGGGGCTTCAGTGAAGTTGTCCTGCAAGGCTTCTGGCTACACCTTCACCGGCTACT
TTTTGTACTGGGTGAAGCAGAGGCCTGGACAAGGCCTTGAGTGGATTGGGGGGATTAATCCTGACAATGGTGGTATT
GACTTCAATGAGAAGTTCAGGAACAAGGCCACACTGACTGTAGACAAATCCTCCAGCACAGCCTACATGCAACTCAG
CAGCCTGACATCTGAGGACTCTGCGGTCTATTATTGTACATTACTAATAGGGAACTATTGGGGCCAAGGCACCACTC
TCACAGTCTCCTCA
Mouse antibody 18G12 Heavy chain: Amino acid sequence (133 aa)
Signal peptide-FR1-CDR1-FR2-CDR2-FR3-CDR3-FR4
(SEQ ID NO: 957)
MGWSYIILFLVATATGVHSQVQLQQSGAELVKPGASVKLSCKASGYTFTGYFLYWVKQRPGQGLEWIGGINPDNGGI
DFNEKERNKATLTVDKSSSTAYMQLSSLTSEDSAVYYCTLLIGNYWGQGTTLTVSS
Mouse antibody 18G12 heavy chain variable framework 1 (FW1) sequence:
(DNA)
(SEQ ID NO: 958)
CAGGTCCAACTGCAGCAGTCTGGGGCTGAACTGGTGAAGCCTGGGGCTTCAGTGAAGTTGTCCTGCAAGGCTTCTGG
CTACACCTTCACC
(amino acids)
(SEQ ID NO: 959)
QVQLQQSGAELVKPGASVKLSCKASGYTFT
Mouse antibody 39H5 heavy chain variable complementarity determining regions
1 (CDR1) sequence:
(DNA)
(SEQ ID NO: 960)
GGCTACTTTTTGTAC
(amino acids)
(SEQ ID NO: 961)
GYFLY
Mouse antibody 18G12 heavy chain variable framework 2 (FW2) sequence:
(DNA)
(SEQ ID NO: 962)
TGGGTGAAGCAGAGGCCTGGACAAGGCCTTGAGTGGATTGGG
(amino acids)
(SEQ ID NO: 963)
WVKQRPGQGLEWIG
Mouse antibody 18G12 heavy chain variable complementarity determining regions
2 (CDR2) sequence:
(DNA)
(SEQ ID NO: 964)
GGGATTAATCCTGACAATGGTGGTATTGACTTCAATGAGAAGTTCAGGAAC
(amino acids)
(SEQ ID NO: 965)
GINPDNGGIDFNEKERN
Mouse antibody 18G12 heavy chain variable framework 3 (FW3) sequence:
(DNA)
(SEQ ID NO: 966)
AAGGCCACACTGACTGTAGACAAATCCTCCAGCACAGCCTACATGCAACTCAGCAGCCTGACATCTGAGGACTCTGC
GGTCTATTATTGTACATTA
(amino acids)
(SEQ ID NO: 967)
KATLTVDKSSSTAYMQLSSLTSEDSAVYYCTL
Mouse antibody 18G12 heavy chain variable complementarity determining regions
3 (CDR3) sequence:
(DNA)
(SEQ ID NO: 968)
CTAATAGGGAACTAT
(amino acids)
(SEQ ID NO: 969)
LIGNY
Mouse antibody 18G12 heavy chain variable framework 4 (FW4) sequence:
(DNA)
(SEQ ID NO: 970)
TGGGGCCAAGGCACCACTCTCACAGTCTCCTCA
(amino acids)
(SEQ ID NO: 971)
WGQGTTLTVSS
Mouse antibody 18G12 Light chain: DNA sequence (393 bp)
Signal sequence-FR1-CDR1-FR2-CDR2-FR3-CDR3-FR4
(SEQ ID NO: 972)
ATGAGTCCTGCCCAGTTCCTGTTTCTGTTAGTGCTCTGGATTCGGGAAACCAATGGTGATGTTGTGATGACCCAGAC
TCCACTCACTTTGTCGGTAACCATTGGACAGCCAGCCTCCATCTCTTGCAAGTCAAGTCAGAGCCTCTTACATAGTG
ATGGAAAGACATATTTGATTTGGTTGTTACAGAGGCCAGGCCAGTCTCCAAAGCGCCTAATCTATCTGGTGTCTAAA
CTGGACTCTGGAGTCCCTGACAGGTTCACTGGCAGTGGATCAGGGACAGATTTCACACTGAAAATCAGCAGAGTGGA
GGCTGAGGATTTGGGAGTTTATTTTTGCTGTCAAGGTACACATTTTCCGTGGACGTTCGGTGGAGGCACCATGCTGG
AAATCAAA
Mouse antibody 18G12 Light chain: Amino acid sequence (131 aa)
Signal peptide-FR1-CDR1-FR2-CDR2-FR3-CDR3-FR4
(SEQ ID NO: 973)
MSPAQFLFLLVLWIRETNGDVVMTQTPLTLSVTIGQPASISCKSSQSLLHSDGKTYLIWLLQRPGQSPKRLIYLVSK
LDSGVPDRFTGSGSGTDFTLKISRVEAEDLGVYFCCQGTHFPWTFGGGTMLEIK
Mouse antibody 18G12 light chain variable framework 1 (FW1) sequence:
(DNA)
(SEQ ID NO: 974)
GATGTTGTGATGACCCAGACTCCACTCACTTTGTCGGTAACCATTGGACAGCCAGCCTCCATCTCTTGC
(amino acids)
(SEQ ID NO: 975)
DVVMTQTPLTLSVTIGQPASISC
Mouse antibody 18G12 light chain variable complementarity determining regions
1 (CDR1) sequence:
(DNA)
(SEQ ID NO: 976)
AAGTCAAGTCAGAGCCTCTTACATAGTGATGGAAAGACATATTTGATT
(amino acids)
(SEQ ID NO: 977)
KSSQSLLHSDGKTYLI
Mouse antibody 18G12 light chain variable framework 2 (FW2) sequence:
(DNA)
(SEQ ID NO: 978)
TGGTTGTTACAGAGGCCAGGCCAGTCTCCAAAGCGCCTAATCTAT
(amino acids)
(SEQ ID NO: 979)
WLLQRPGQSPKRLIY
Mouse antibody 18G12 light chain variable complementarity determining regions
2 (CDR2) sequence:
(DNA)
(SEQ ID NO: 980)
CTGGTGTCTAAACTGGACTCT
(amino acids)
(SEQ ID NO: 981)
LVSKLDS
Mouse antibody 18G12 light chain variable framework 3 (FW3) sequence:
(DNA)
(SEQ ID NO: 982)
GGAGTCCCTGACAGGTTCACTGGCAGTGGATCAGGGACAGATTTCACACTGAAAATCAGCAGAGTGGAGGCTGAGGA
TTTGGGAGTTTATTTTTGC
(amino acids)
(SEQ ID NO: 983)
GVPDRFTGSGSGTDFTLKISRVEAEDLGVYFC
Mouse antibody 18G12 light chain variable complementarity determining regions
3 (CDR3) sequence:
(DNA)
(SEQ ID NO: 984)
TGTCAAGGTACACATTTTCCGTGGACG
(amino acids)
(SEQ ID NO: 985)
CQGTHFPWT
Mouse antibody 18G12 light chain variable framework 4 (FW4) sequence:
(DNA)
(SEQ ID NO: 986)
TTCGGTGGAGGCACCATGCTGGAAATCAAA
(amino acids)
(SEQ ID NO: 987)
FGGGTMLEIK
Mouse antibody 20A10 Heavy chain: DNA sequence (417 bp)
Signal sequence-FR1-CDR1-FR2-CDR2-FR3-CDR3-FR4
(SEQ ID NO: 988)
ATGAACTTCGGGTTCAGCTTGATTTTCCTTGTCCTTGTTTTAAAAGGTGTCCAGTGTGAAGTGATGCTGGTGGAGTC
TGGGGGAGGCTTAGTGAAGCCTGGAGGGTCCCTGAAACTCTCCTGTCAGCCTCTGGATTCACTTTCAGTACCTATGC
CATGTCTTGGATTCGCCAGACTCCAGAGAAGAGGCTGGAGTGGGTCGCATCCATTGGTCGTGCTGGTTCCACCTACT
ATTCAGACAGTGTGAAGGGCCGATTCACCATCTCCAGAGATAATGTCCGGAACATCCTGTACCTGCAAATGAGCAGT
CTGAGGTCTGAGGACACGGCCATGTATTACTGTGCTAGAGGCCCGATCTACAATGATTACGACGAGTTTGCTTACTG
GGGCCAAGGGACTCTGGTCACTGTCTCTGCA
Mouse antibody 20A10 Heavy chain: Amino acid sequence (139 aa)
Signal peptide-FR1-CDR1-FR2-CDR2-FR3-CDR3-FR4
(SEQ ID NO: 989)
MNFGESLIFLVLVLKGVQCEVMLVESGGGLVKPGGSLKLSCAASGFTESTYAMSWIRQTPEKRLEWVASIGRAGSTY
YSDSVKGRFTISRDNVRNILYLQMSSLRSEDTAMYYCARGPIYNDYDEFAYWGQGTLVTVSA
Mouse antibody 20A10 heavy chain variable framework 1 (FW1) sequence:
(DNA)
(SEQ ID NO: 990)
GAAGTGATGCTGGTGGAGTCTGGGGGAGGCTTAGTGAAGCCTGGAGGGTCCCTGAAACTCTCCTGTGCAGCCTCTGG
ATTCACTTTCAGT
(amino acids)
(SEQ ID NO: 991)
EVMLVESGGGLVKPGGSLKLSCAASGFTFS
Mouse antibody 20A10 heavy chain variable complementarity determining regions
1 (CDR1) sequence:
(DNA)
(SEQ ID NO: 992)
ACCTATGCCATGTCT
(amino acids)
(SEQ ID NO: 993)
TYAMS
Mouse antibody 20A10 heavy chain variable framework 2 (FW2) sequence:
(DNA)
(SEQ ID NO: 994)
TGGATTCGCCAGACTCCAGAGAAGAGGCTGGAGTGGGTCGCA
(amino acids)
(SEQ ID NO: 995)
WIRQTPEKRLEWVA
Mouse antibody 20A10 heavy chain variable complementarity determining regions
2 (CDR2) sequence:
(DNA)
(SEQ ID NO: 996)
TCCATTGGTCGTGCTGGTTCCACCTACTATTCAGACAGTGTGAAGGGC
(amino acids)
(SEQ ID NO: 997)
SIGRAGSTYYSDSVKG
Mouse antibody 20A10 heavy chain variable framework 3 (FW3) sequence:
(DNA)
(SEQ ID NO: 998)
CGATTCACCATCTCCAGAGATAATGTCCGGAACATCCTGTACCTGCAAATGAGCAGTCTGAGGTCTGAGGACACGGC
CATGTATTACTGTGCTAGA
(amino acids)
(SEQ ID NO: 999)
RFTISRDNVRNILYLQMSSLRSEDTAMYYCAR
Mouse antibody 20A10 heavy chain variable complementarity determining regions
3 (CDR3) sequence:
(DNA)
(SEQ ID NO: 1000)
GGCCCGATCTACAATGATTACGACGAGTTTGCTTAC
(amino acids)
(SEQ ID NO: 1001)
GPIYNDYDEFAY
Mouse antibody 20A10 heavy chain variable framework 4 (FW4) sequence:
(DNA)
(SEQ ID NO: 1002)
TGGGGCCAAGGGACTCTGGTCACTGTCTCTGCA
(amino acids)
(SEQ ID NO: 1003)
WGQGTLVTVSA
Mouse antibody 20A10 Light chain: DNA sequence (396 bp)
Signal sequence-FR1-CDR1-FR2-CDR2-FR3-CDR3-FR4
(SEQ ID NO: 1004)
ATGGAATCACAGACTCAGGTCTTCCTCTCCCTGCTGCTCTGGGTATCTGGTACCTGTGGGAACATTATGATGACACA
GTCGCCATCATCTCTGGCTGTGTCTGCAGGAGAAAAGGTCACTATGAGCTGTAAGTCCAGTCAAAGTGTTTTATACA
GTTCAAATCAGAAGAACTATTTGGCCTGGTACCAGCAGAAACCAGGGCAGTCTCCTAAACTGCTGATCTACTGGGCA
TCCACTAGGGAATCTGGTGTCCCTGATCGCTTCACAGGCAGTGGATCTGGGACAGATTTTACTCTTACCATCAGCAG
TGTACAAGCTGAAGACCTGGCAGTTTATTACTGTCATCAATACCTCTCCTCGCTCACGTTCGGTGCTGGGACCAAGC
TGGAGCTGAAA
Mouse antibody 20A10 Light chain: Amino acid sequence (132 aa)
Signal peptide-FR1-CDR1-FR2-CDR2-FR3-CDR3-FR4
(SEQ ID NO: 1005)
MESQTQVFLSLLLWVSGTCGNIMMTQSPSSLAVSAGEKVTMSCKSSQSVLYSSNQKNYLAWYQQKPGQSPKLLIYWA
STRESGVPDRFTGSGSGTDFTLTISSVQAEDLAVYYCHQYLSSLTFGAGTKLELK
Mouse antibody 20A10 light chain variable framework 1 (FW1) sequence:
(DNA)
(SEQ ID NO: 1006)
AACATTATGATGACACAGTCGCCATCATCTCTGGCTGTGTCTGCAGGAGAAAAGGTCACTATGAGCTGT
(amino acids)
(SEQ ID NO: 1007)
NIMMTQSPSSLAVSAGEKVTMSC
Mouse antibody 20A10 light chain variable complementarity determining regions
1 (CDR1) sequence:
(DNA)
(SEQ ID NO: 1008)
AAGTCCAGTCAAAGTGTTTTATACAGTTCAAATCAGAAGAACTATTTGGCC
(amino acids)
(SEQ ID NO: 1009)
KSSQSVLYSSNQKNYLA
Mouse antibody 20A10 light chain variable framework 2 (FW2) sequence:
(DNA)
(SEQ ID NO: 1010)
TGGTACCAGCAGAAACCAGGGCAGTCTCCTAAACTGCTGATCTAC
(amino acids)
(SEQ ID NO: 1011)
WYQQKPGQSPKLLIY
Mouse antibody 20A10 light chain variable complementarity determining regions
2 (CDR2) sequence:
(DNA)
(SEQ ID NO: 1012)
TGGGCATCCACTAGGGAATCT
(amino acids)
(SEQ ID NO: 1013)
WASTRES
Mouse antibody 20A10 light chain variable framework 3 (FW3) sequence:
(DNA)
(SEQ ID NO: 1014)
GGTGTCCCTGATCGCTTCACAGGCAGTGGATCTGGGACAGATTTTACTCTTACCATCAGCAGTGTACAAGCTGAAGA
CCTGGCAGTTTATTACTGT
(amino acids)
(SEQ ID NO: 1015)
GVPDRFTGSGSGTDFTLTISSVQAEDLAVYYC
Mouse antibody 20A10 light chain variable complementarity determining regions
3 (CDR3) sequence:
(DNA)
(SEQ ID NO: 1016)
CATCAATACCTCTCCTCGCTCACG
(amino acids)
(SEQ ID NO: 1017)
HQYLSSLT
Mouse antibody 20A10 light chain variable framework 4 (FW4) sequence:
(DNA)
(SEQ ID NO: 1018)
TTCGGTGCTGGGACCAAGCTGGAGCTGAAA
(amino acids)
(SEQ ID NO: 1019)
FGAGTKLELK
Mouse antibody 25E6 Heavy chain: DNA sequence (414 bp)
Signal sequence-FR1-CDR1-FR2-CDR2-FR3-CDR3-FR4
(SEQ ID NO: 1020)
ATGAACTTCGGGCTCAGCTTGATTTTCCTTGCCCTCATTTTAAAAGGTGTCCAGTGTGAGGTGCAGCTGGTGGAGTC
TGGGGGAGACTTAGTGAAGCCTGGAGGGTCCCTGAAACTCTCCTGTGCAGCCTCTGGTTTCACTTTCAGTAGTTATG
GAATGTCTTGGGTTCGCCAGACTCCAGACAAGAGGCTGGAGTGGGTCGCAACCATTAGTAATGGTGGTAGACACACC
TTCTATCCAGACAGTGTGAAGGGGCGATTCACCATCTCCAGAGACAATGCCAAGAACACCCTGTATCTGCAAATGAG
CAGTCTGAAGTTGAGGACACAGCCATGTATTTATGTGTAAGACAGACTGGGACGGAGGGCTGGTTTGCTTACTGGGG
CCAAGGGACTCTGGTCACTGTCTCTGCA
Mouse antibody 25E6 Heavy chain: Amino acid sequence (138 aa)
Signal peptide-FR1-CDR1-FR2-CDR2-FR3-CDR3-FR4
(SEQ ID NO: 1021)
MNFGLSLIFLALILKGVQCEVQLVESGGDLVKPGGSLKLSCAASGFTESSYGMSWVRQTPDKRLEWVATISNGGRHT
FYPDSVKGRFTISRDNAKNTLYLQMSSLKSEDTAMYLCVRQTGTEGWFAYWGQGTLVTVSA
Mouse antibody 25E6 heavy chain variable framework 1 (FW1) sequence:
(DNA)
(SEQ ID NO: 1022)
GAGGTGCAGCTGGTGGAGTCTGGGGGAGACTTAGTGAAGCCTGGAGGGTCCCTGAAACTCTCCTGTGCAGCCTCTGG
TTTCACTTTCAGT
(amino acids)
(SEQ ID NO: 1023)
EVQLVESGGDLVKPGGSLKLSCAASGFTFS
Mouse antibody 25E6 heavy chain variable complementarity determining regions
1 (CDR1) sequence:
(DNA)
(SEQ ID NO: 1024)
AGTTATGGAATGTCT
(amino acids)
(SEQ ID NO: 1025)
SYGMS
Mouse antibody 25E6 heavy chain variable framework 2 (FW2) sequence:
(DNA)
(SEQ ID NO: 1026)
TGGGTTCGCCAGACTCCAGACAAGAGGCTGGAGTGGGTCGCA
(amino acids)
(SEQ ID NO: 1027)
WVRQTPDKRLEWVA
Mouse antibody 25E6 heavy chain variable complementarity determining regions
2 (CDR2) sequence:
(DNA)
(SEQ ID NO: 1028)
ACCATTAGTAATGGTGGTAGACACACCTTCTATCCAGACAGTGTGAAGGGG
(aminoacids)
(SEQ ID NO: 1029)
TISNGGRHTFYPDSVKG
Mouse heavy chain variable framework 3 (FW3) sequence:
(DNA)
(SEQ ID NO: 1030)
CGATTCACCATCTCCAGAGACAATGCCAAGAACACCCTGTATCTGCAAATGAGCAGTCTGAAGTCTGAGGACACAGC
CATGTATTTATGTGTAAGA
(amino acids)
(SEQ ID NO: 1031)
RFTISRDNAKNTLYLQMSSLKSEDTAMYLCVR
Mouse antibody 25E6 heavy chain variable complementarity determining regions
3 (CDR3) sequence:
(DNA)
(SEQ ID NO: 1032)
CAGACTGGGACGGAGGGCTGGTTTGCTTAC
(amino acids)
(SEQ ID NO: 1033)
QTGTEGWFAY
Mouse antibody 25E6 heavy chain variable framework 4 (FW4) sequence:
(DNA)
(SEQ ID NO: 1034)
TGGGGCCAAGGGACTCTGGTCACTGTCTCTGCA
(amino acids)
(SEQ ID NO: 1035)
WGQGTLVTVSA
Mouse antibody 25E6 Light chain: DNA sequence (393 bp)
Signal sequence-FR1-CDR1-FR2-CDR2-FR3-CDR3-FR4
(SEQ ID NO: 1036)
ATGAGTCCTGCCCAGTTCCTGTTTCTGTTAGTGCTCTGGATTCGGGAAACCAACGGTGATGTTGTGATGACCCAGAC
TCCACTCACTTTGTCGGTTACCATTGGACAACCAGCCTCCATCTCTTGCAAGTCAAGTCAGAGCCTCTTAGATAGTG
ATGGAAAGACATATTTGAATTGGTTGTTACAGAGGCCAGGCCAGTCTCCAAAGCGCCTAATCTATCTGGTGTCTAAA
CTGGACTCTGGAGTCCCTGACAGGTTCACTGGCAGTGGATCAGGGACAGATTTCACACTGAAAATCAGCAGAGGGAG
GCTGAGGATTTGGGAGTTTATTATTGCTGGCAAGGTACACATTTTCCTCAGACGTTCGGTGGAGGCACCAAGCTGGA
AATCAAA
Mouse antibody 25E6 Light chain: Amino acid sequence (131 aa)
Signal peptide-FR1-CDR1-FR2-CDR2-FR3-CDR3-FR4
(SEQ ID NO: 1037)
MSPAQFLELLVLWIRETNGDVVMTQTPLTLSVTIGQPASISCKSSQSLLDSDGKTYLNWLLQRPGQSPKRLIYLVSK
LDSGVPDRFTGSGSGTDFTLKISRVEAEDLGVYYCWQGTHFPQTEGGGTKLEIK
Mouse antibody 25E6 light chain variable framework 1 (FW1) sequence:
(DNA)
(SEQ ID NO: 1038)
GATGTTGTGATGACCCAGACTCCACTCACTTTGTCGGTTACCATTGGACAACCAGCCTCCATCTCTTGC
(amino acids)
(SEQ ID NO: 1039)
DVVMTQTPLTLSVTIGQPASISC
Mouse antibody 25E6 light chain variable complementarity determining regions
1 (CDR1) sequence:
(DNA)
(SEQ ID NO: 1040)
AAGTCAAGTCAGAGCCTCTTAGATAGTGATGGAAAGACATATTTGAAT
(amino acids)
(SEQ ID NO: 1041)
KSSQSLLDSDGKTYLN
Mouse antibody 25E6 light chain variable framework 2 (FW2) sequence:
(DNA)
(SEQ ID NO: 1042)
TGGTTGTTACAGAGGCCAGGCCAGTCTCCAAAGCGCCTAATCTAT
(amino acids)
(SEQ ID NO: 1043)
WLLQRPGQSPKRLIY
Mouse antibody 25E6 light chain variable complementarity determining regions
2 (CDR2) sequence:
(DNA)
(SEQ ID NO: 1044)
CTGGTGTCTAAACTGGACTCT
(amino acids)
(SEQ ID NO: 1045)
LVSKLDS
Mouse antibody 25E6 light chain variable framework 3 (FW3) sequence:
(DNA)
(SEQ ID NO: 1046)
GGAGTCCCTGACAGGTTCACTGGCAGTGGATCAGGGACAGATTTCACACTGAAAATCAGCAGAGTGGAGGCTGAGGA
TTTGGGAGTTTATTATTGC
(amino acids)
(SEQ ID NO: 1047)
GVPDRFTGSGSGTDFTLKISRVEAEDLGVYYC
Mouse antibody 25E6 light chain variable complementarity determining regions
3 (CDR3) sequence:
(DNA)
(SEQ ID NO: 1048)
TGGCAAGGTACACATTTTCCTCAGACG
(amino acids)
(SEQ ID NO: 1049)
WQGTHFPQT
Mouse antibody 25E6 light chain variable framework 4 (FW4) sequence:
(DNA)
(SEQ ID NO: 1050)
TTCGGTGGAGGCACCAAGCTGGAAATCAAA
(amino acids)
(SEQ ID NO: 1051)
FGGGTKLEIK
Mouse antibody 28F9 Heavy chain: DNA sequence (399 bp)
Signal sequence-FR1-CDR1-FR2-CDR2-FR3-CDR3-FR4
(SEQ ID NO: 1052)
ATGGGATGGAGCTATATCATCCTCTTTTTGGTAGCAACAGCTACAGGTGTCCACTCCCAGGTCCAACTGCAGCAGCC
TGGGGCTGAACTGGTGCAGCCTGGGGCTTCAGTGAAGTTGTCCTGCAAGGCTTCTGGCTACACCTTCACCGGCTACT
TTTTGTACTGGGTGAAGCAGAGGCCTGGACATGGCCTTGAGTGGATTGGGGGAATTCATCCTAGCAATGGTGATACT
GACTTCAATGAGAAGTTCAAGAACAAGGCCACACTGACTGTAGACATATCCTCCAGCACTGCCTACATGCAACTCAG
CAGCCTGACATCTGAGGACTCTGCGGTCTATTATTGTACATTACTAATAGGGGTCTACTGGGGCCAAGGCACCACTC
TCACAGTCTCCTCA
Mouse antibody 28F9 Heavy chain: Amino acid sequence (133 aa)
Signal peptide-FR1-CDR1-FR2-CDR2-FR3-CDR3-FR4
(SEQ ID NO: 1053)
MGWSYIILFLVATATGVHSQVQLQQPGAELVQPGASVKLSCKASGYTFTGYFLYWVKQRPGHGLEWIGGIHPSNGDT
DFNEKEKNKATLTVDISSSTAYMQLSSLTSEDSAVYYCTLLIGVYWGQGTTLTVSS
Mouse antibody 28F9 heavy chain variable framework 1 (FW1) sequence:
(DNA)
(SEQ ID NO: 1054)
CAGGTCCAACTGCAGCAGCCTGGGGCTGAACTGGTGCAGCCTGGGGCTTCAGTGAAGTTGTCCTGCAAGGCTTCTGG
CTACACCTTCACC
(amino acids)
(SEQ ID NO: 1055)
QVQLQQPGAELVQPGASVKLSCKASGYTFT
Mouse antibody 28F9 heavy chain variable complementarity determining regions
1 (CDR1) sequence:
(DNA)
(SEQ ID NO: 1056)
GGCTACTTTTTGTAC
(amino acids)
(SEQ ID NO: 1057)
GYFLY
Mouse antibody 28F9 heavy chain variable framework 2 (FW2) sequence:
(DNA)
(SEQ ID NO: 1058)
TGGGTGAAGCAGAGGCCTGGACATGGCCTTGAGTGGATTGGG
(amino acids)
(SEQ ID NO: 1059)
WVKQRPGHGLEWIG
Mouse antibody 28F9 heavy chain variable complementarity determining regions
2 (CDR2) sequence:
(DNA)
(SEQ ID NO: 1060)
GGAATTCATCCTAGCAATGGTGATACTGACTTCAATGAGAAGTTCAAGAAC
(amino acids)
(SEQ ID NO: 1061)
GIHPSNGDTDFNEKFKN
Mouse antibody 28F9 heavy chain variable framework 3 (FW3) sequence:
(DNA)
(SEQ ID NO: 1062)
AAGGCCACACTGACTGTAGACATATCCTCCAGCACTGCCTACATGCAACTCAGCAGCCTGACATCTGAGGACTCTGC
GGTCTATTATTGTACATTA
(amino acids)
(SEQ ID NO: 1063)
KATLTVDISSSTAYMQLSSLTSEDSAVYYCTL
Mouse antibody 28F9 heavy chain variable complementarity determining regions
3 (CDR3) sequence:
(DNA)
(SEQ ID NO: 1064)
CTAATAGGGGTCTAC
(amino acids)
(SEQ ID NO: 1065)
LIGVY
Mouse antibody 28F9 heavy chain variable framework 4 (FW4) sequence:
(DNA)
(SEQ ID NO: 1066)
TGGGGCCAAGGCACCACTCTCACAGTCTCCTCA
(amino acids)
(SEQ ID NO: 1067)
WGQGTTLTVSS
Mouse antibody 28F9 Light chain: DNA sequence (393 bp)
Signal sequence-FR1-CDR1-FR2-CDR2-FR3-CDR3-FR4
(SEQ ID NO: 1068)
ATGAGTCCTGCCCAGTTCCTGTTTCTGTTAGTGCTCTGGATTCGGGAAACCAACGGTGATGTTGTGATGACCCAGAC
TCCACTCACTTTGTCGGTTACCATTGGACAACCAGCCTCCATCTCTTGCAAGTCAAGTCAGAGCCTCTTACATAGTG
ATGGAAAGACATATTTGATTTGGTTGTTACAGAGGCCAGGCCAGTCTCCAAAGCGCCTAATCTATCTGGTGTCTAAA
CTGGACTCTGGAGTCCCTGACAGGTTCACCGGCAGTGGATCAGGGACAGATTTCACACTGAAAATCAGCAGAGTGGA
GGCTGAGGATTTGGGAGTTTATTTTTGCTGTCAAGGTACACATTTTCCGTGGACGTTCGGTGGAGGCACCATGCTGG
AAATCAAA
Mouse antibody 28F9 Light chain: Amino acid sequence (131 aa)
Signal peptide-FR1-CDR1-FR2-CDR2-FR3-CDR3-FR4
(SEQ ID NO: 1069)
MSPAQFLFLLVLWIRETNGDVVMTQTPLTLSVTIGQPASISCKSSQSLLHSDGKTYLIWLLQRPGQSPKRLIYLVSK
LDSGVPDRFTGSGSGTDFTLKISRVEAEDLGVYFCCQGTHFPWTFGGGTMLEIK
Mouse antibody 28F9 light chain variable framework 1 (FW1) sequence:
(DNA)
(SEQ ID NO: 1070)
GATGTTGTGATGACCCAGACTCCACTCACTTTGTCGGTTACCATTGGACAACCAGCCTCCATCTCTTGC
(amino acids)
(SEQ ID NO: 1071)
DVVMTQTPLTLSVTIGQPASISC
Mouse antibody 28F9 light chain variable complementarity determining regions
1 (CDR1) sequence:
(DNA)
(SEQ ID NO: 1072)
AAGTCAAGTCAGAGCCTCTTACATAGTGATGGAAAGACATATTTGATT
(amino acids)
(SEQ ID NO: 1073)
KSSQSLLHSDGKTYLI
Mouse antibody 28F9 light chain variable framework 2 (FW2) sequence:
(DNA)
(SEQ ID NO: 1074)
TGGTTGTTACAGAGGCCAGGCCAGTCTCCAAAGCGCCTAATCTAT
(amino acids)
(SEQ ID NO: 1075)
WLLQRPGQSPKRLIY
Mouse antibody 28F9 light chain variable complementarity determining regions
2 (CDR2) sequence:
(DNA)
(SEQ ID NO: 1076)
CTGGTGTCTAAACTGGACTCT
(amino acids)
(SEQ ID NO: 1077)
LVSKLDS
Mouse antibody 28F9 light chain variable framework 3 (FW3) sequence:
(DNA)
(SEQ ID NO: 1078)
GGAGTCCCTGACAGGTTCACCGGCAGTGGATCAGGGACAGATTTCACACTGAAAATCAGCAGAGTGGAGGCTGAGGA
TTTGGGAGTTTATTTTTGC
(amino acids)
(SEQ ID NO: 1079)
GVPDRFTGSGSGTDFTLKISRVEAEDLGVYFC
Mouse antibody 28F9 light chain variable complementarity determining regions
3 (CDR3) sequence:
(DNA)
(SEQ ID NO: 1080)
TGTCAAGGTACACATTTTCCGTGGACG
(amino acids)
(SEQ ID NO: 1081)
CQGTHFPWT
Mouse antibody 28F9 light chain variable framework 4 (FW4) sequence:
(DNA)
(SEQ ID NO: 1082)
TTCGGTGGAGGCACCATGCTGGAAATCAAA
(amino acids)
(SEQ ID NO: 1083)
FGGGTMLEIK
Mouse antibody 18B4 Heavy chain: DNA sequence (411 bp)
Signal sequence-FR1-CDR1-FR2-CDR2-FR3-CDR3-FR4
(SEQ ID NO: 1084)
ATGTACTTGGGACTGAACTATGTATTCATAGTTTTTCTCTTAAATGGTGTCCAGAGTGAAGTGAAACTTGAGGAGTC
TGGAGGAGGCTTGGTGCAACCTGGGGGATCCATGAAACTCTCTTGTGCTGCCTCTGGATTCACTTTTAATGACGCCT
GGATGGACTGGGTCCGCCAGTCTCCAGAGAAGGGGCTTGAGTGGGTTGCTGAAATTAGAAGCACAGCTAATATTCAT
ACAACATACTATGCTGAGTCTGTCCAAGGGAGGTTCACCATCTCAAGAGATGATTCCAAAAGTAGTGTCTACCTGCA
AATGAACAGCTTGAGAGCTGAAGACACTGGCATTTATTATTGTACCCCATTACTCTACGGATTTGCTTACTGGGGCC
AAGGGACTCTGGTCACTGTCTCTGCA
Mouse antibody 18B4 Heavy chain: Amino acid sequence (137 aa)
Signal peptide-FR1-CDR1-FR2-CDR2-FR3-CDR3-FR4
(SEQ ID NO: 1085)
MYLGLNYVFIVFLLNGVQSEVKLEESGGGLVQPGGSMKLSCAASGFTFNDAWMDWVRQSPEKGLEWVAEIRSTANIH
TTYYAESVQGRFTISRDDSKSSVYLQMNSLRAEDTGIYYCTPLLYGFAYWGQGTLVTVSA
Mouse antibody 18B4 heavy chain variable framework 1 (FW1) sequence:
(DNA)
(SEQ ID NO: 1086)
GAAGTGAAACTTGAGGAGTCTGGAGGAGGCTTGGTGCAACCTGGGGGATCCATGAAACTCTCTTGTGCTGCCTCTGG
ATTCACTTTTAAT
(amino acids)
(SEQ ID NO: 1087)
EVKLEESGGGLVQPGGSMKLSCAASGFTFN
Mouse antibody 18B4 heavy chain variable complementarity determining regions
1 (CDR1) sequence:
(DNA)
(SEQ ID NO: 1088)
GACGCCTGGATGGAC
(amino acids)
(SEQ ID NO: 1089)
DAWMD
Mouse antibody 18B4 heavy chain variable framework 2 (FW2) sequence:
(DNA)
(SEQ ID NO: 1090)
TGGGTCCGCCAGTCTCCAGAGAAGGGGCTTGAGTGGGTTGCT
(amino acids)
(SEQ ID NO: 1091)
WVRQSPEKGLEWVA
Mouse antibody 18B4 heavy chain variable complementarity determining regions
2 (CDR2) sequence:
(DNA)
(SEQ ID NO: 1092)
GAAATTAGAAGCACAGCTAATATTCATACAACATACTATGCTGAGTCTGTCCAAGGG
(amino acids)
(SEQ ID NO: 1093)
EIRSTANIHTTYYAESVQG
Mouse antibody 18B4 heavy chain variable framework 3 (FW3) sequence:
(DNA)
(SEQ ID NO: 1094)
AGGTTCACCATCTCAAGAGATGATTCCAAAAGTAGTGTCTACCTGCAAATGAACAGCTTGAGAGCTGAAGACACTGG
CATTTATTATTGTACCCCA
(amino acids)
(SEQ ID NO: 1095)
RFTISRDDSKSSVYLQMNSLRAEDTGIYYCTP
Mouse antibody 18B4 heavy chain variable complementarity determining regions
3 (CDR3) sequence:
(DNA)
(SEQ ID NO: 1096)
TTACTCTACGGATTTGCTTAC
(amino acids)
(SEQ ID NO: 1097)
LLYGFAY
Mouse antibody 18B4 heavy chain variable framework 4 (FW4) sequence:
(DNA)
(SEQ ID NO: 1098)
TGGGGCCAAGGGACTCTGGTCACTGTCTCTGCA
(amino acids)
(SEQ ID NO: 1099)
WGQGTLVTVSA
Mouse antibody 18B4 Light chain: DNA sequence (393 bp)
Signal sequence-FR1-CDR1-FR2-CDR2-FR3-CDR3-FR4
(SEQ ID NO: 1100)
ATGAAGTTGCCTGTTAGGCTGTTGGTGCTGATGTTCTGGATTCCTGCTTCCAGCAGTGATGTTGTGATGACCCAAAG
TCCACTCTCCCTGCCTGTCAGTCTTGGAGATCAAGCCTCCATCTCTTGCAGAACTAGTCAGAGCCTTGTACACAGTA
ATGGAAACACCTATTTACATTGGCACCTGCAGAAGCCAGGCCAGTCTCCAAAGGTCCTGATCTACAAAGTTTCCAGC
CGATTTTCTGGGGTCCCAGACAGGTTCAGTGGCAGTGGATCGGGGACAGATTTCACACTCAAGATCAGCAGAGTGGA
GGCTGAGGATCTGGGAGTTTATTTCTGCTCTCAAAATACACATGTTCCGTACACGTTCGGAGGGGGGACCAAGCTGG
AAATAAAA
Mouse antibody 18B4 Light chain: Amino acid sequence (131 aa)
Signal peptide-FR1-CDR1-FR2-CDR2-FR3-CDR3-FR4
(SEQ ID NO: 1101)
MKLPVRLLVLMFWIPASSSDVVMTQSPLSLPVSLGDQASISCRTSQSLVHSNGNTYLHWHLQKPGQSPKVLIYKVSS
RFSGVPDRFSGSGSGTDFTLKISRVEAEDLGVYFCSQNTHVPYTFGGGTKLEIK
Mouse antibody 18B4 light chain variable framework 1 (FW1) sequence:
(DNA)
(SEQ ID NO: 1102)
GATGTTGTGATGACCCAAAGTCCACTCTCCCTGCCTGTCAGTCTTGGAGATCAAGCCTCCATCTCTTGC
(amino acids)
(SEQ ID NO: 1103)
DVVMTQSPLSLPVSLGDQASISC
Mouse antibody 18B4 light chain variable complementarity determining regions
1 (CDR1) sequence:
(DNA)
(SEQ ID NO: 1104)
AGAACTAGTCAGAGCCTTGTACACAGTAATGGAAACACCTATTTACAT
(amino acids)
(SEQ ID NO: 1105)
RTSQSLVHSNGNTYLH
Mouse antibody 18B4 light chain variable framework 2 (FW2) sequence:
(DNA)
(SEQ ID NO: 1106)
TGGCACCTGCAGAAGCCAGGCCAGTCTCCAAAGGTCCTGATCTAC
(amino acids)
(SEQ ID NO: 1107)
WHLQKPGQSPKVLIY
Mouse antibody 18B4 light chain variable complementarity determining regions
2 (CDR2) sequence:
(DNA)
(SEQ ID NO: 1108)
AAAGTTTCCAGCCGATTTTCT
(amino acids)
(SEQ ID NO: 1109)
KVSSRFS
Mouse antibody 18B4 light chain variable framework 3 (FW3) sequence:
(DNA)
(SEQ ID NO: 1110)
GGGGTCCCAGACAGGTTCAGTGGCAGTGGATCGGGGACAGATTTCACACTCAAGATCAGCAGAGTGGAGGCTGAGGA
TCTGGGAGTTTATTTCTGC
(amino acids)
(SEQ ID NO: 1111)
GVPDRFSGSGSGTDFTLKISRVEAEDLGVYFC
Mouse antibody 18B4 light chain variable complementarity determining regions
3 (CDR3) sequence:
(DNA)
(SEQ ID NO: 1112)
TCTCAAAATACACATGTTCCGTACACG
(amino acids)
(SEQ ID NO: 1113)
SQNTHVPYT
Mouse antibody 18B4 light chain variable framework 4 (FW4) sequence:
(DNA)
(SEQ ID NO: 1114)
TTCGGAGGGGGGACCAAGCTGGAAATAAAA
(amino acids)
(SEQ ID NO: 1115)
FGGGTKLEIK
Mouse Antibody 1E4 Heavy chain: DNA sequence (408 bp)
Signal sequence-FR1-CDR1-FR2-CDR2-FR3-CDR3-FR4
(SEQ ID NO: 1116)
ATGGAATGGCCTTGTATCTTTCTCTTCCTCCTGTCAGTAACTGAAGGTGTCCACTCCCAGGTTCAGCTGCAGCAGTC
TGGGGCTGAGCTGGTGAGGCCTGGGTCCTCAGTGAAGATTTCCTGTAAGGCTTCTGGCTATGCATTCAGTACCTACT
GGATGAACTGGGTGAAGCAGAGGCCTGGACAGGGTCTTGAGTGGATTGGACAGATTTATCCTGGAGATAGTGATACT
AACTACAATGGAAAGTTCAAGGGTAAAGCCACACTGACTGCAGACAAGTCCTCCAACACAGCCTACATGCAGCTCAG
CAGCCTAACATCTGAGGACTCTGCGGTCTTTTTCTGTGCAAGAGGTAACCACGCCTCTATGGACTACTGGGGTCAAG
GAACCTCAGTCACCGTCTCCTCA
Mouse Antibody 1E4 Heavy chain: Amino acid sequence (136 aa)
Signal peptide-FR1-CDR1-FR2-CDR2-FR3-CDR3-FR4
(SEQ ID NO: 1117)
MEWPCIFLELLSVTEGVHSQVQLQQSGAELVRPGSSVKISCKASGYAFSTYWNWVKQRPGQGLEWIGQIYPGDSDT
NYNGKFKGKATLTADKSSNTAYMQLSSLTSEDSAVFECARGNHASMDYWGQGTSVTVSS
Mouse Antibody 1E4 heavy chain variable framework 1 (FW1) sequence:
(DNA)
(SEQ ID NO: 1118)
CAGGTTCAGCTGCAGCAGTCTGGGGCTGAGCTGGTGAGGCCTGGGTCCTCAGTGAAGATTTCCTGTAAGGCTTCTGG
CTATGCATTCAGT
(amino acids)
(SEQ ID NO: 1119)
QVQLQQSGAELVRPGSSVKISCKASGYAFS
Mouse antibody 1E4 heavy chain variable complementarity determining regions 1
(CDR1) sequence:
(DNA)
(SEQ ID NO: 1200)
ACCTACTGGATGAAC
(amino acids)
(SEQ ID NO: 1201)
TYWMN
Mouse antibody 1E4 heavy chain variable framework 2 (FW2) sequence:
(DNA)
(SEQ ID NO: 1202)
TGGGTGAAGCAGAGGCCTGGACAGGGTCTTGAGTGGATTGGA
(amino acids)
(SEQ ID NO: 1203)
WVKQRPGQGLEWIG
Mouse antibody 1E4 heavy chain variable complementarity determining regions 2
(CDR2) sequence:
(DNA)
(SEQ ID NO: 1204)
CAGATTTATCCTGGAGATAGTGATACTAACTACAATGGAAAGTTCAAGGGT
(amino acids)
(SEQ ID NO: 1205)
QTYPGDSDTNYNGKFKG
Mouse antibody 1E4 heavy chain variable framework 3 (FW3) sequence:
(DNA)
(SEQ ID NO: 1206)
AAAGCCACACTGACTGCAGACAAGTCCTCCAACACAGCCTACATGCAGCTCAGCAGCCTAACATCTGAGGACTCTGC
GGTCTTTTTCTGTGCAAGA
(amino acids)
(SEQ ID NO: 1207)
KATLTADKSSNTAYMQLSSLTSEDSAVFFCAR
Mouse antibody 1E4 heavy chain variable complementarity determining regions 3
(CDR3) sequence:
(DNA)
(SEQ ID NO: 1208)
GGTAACCACGCCTCTATGGACTAC
(amino acids)
(SEQ ID NO: 1209)
GNHASMDY
Mouse antibody 1E4 heavy chain variable framework 4 (FW4) sequence:
(DNA)
(SEQ ID NO: 1210)
TGGGGTCAAGGAACCTCAGTCACCGTCTCCTCA
(amino acids)
(SEQ ID NO: 1211)
WGQGTSVTVSS
Mouse Antibody 1E4 Light chain: DNA sequence (393 bp)
Signal sequence-FR1-CDR1-FR2-CDR2-FR3-CDR3-FR4
(SEQ ID NO: 1212)
ATGAAGTTGCCTGTTAGGCTGTTGGTGCTGATGTTCTGGATTCCTGCTTCCAGCAGTGATGTTGTGATGACCCAAAC
TCCACTCTCCCTGCCTGTCAGTCTTGGAGATCAAGCCTCCATCTCTTGCAGATCTAGTCAGAGCCTTGTACACAGTA
ATGGAAACACCTATTTACATTGGTACCTGCAGAAGCCAGGCCAGTCTCCAAAGCTCCTGATCTACAAAGTTTCCAAC
CGATTTTCTGGGGTCCCAGACAGGTTCAGTGGCAGTGGATCAGGGACAGATTTCACACTCAAGATCAGCAGAGTGGA
GGCTGAGGATCTGGGAGTTTATTTCTGCTCTCAAAAAACACATGTTCCGTGGACGTTCGGTGGAGGCACCAAGCTGG
AAATCAAA
Mouse Antibody 1E4 Light chain: Amino acid sequence (131 aa)
Signal peptide-FR1-CDR1-FR2-CDR2-FR3-CDR3-FR4
(SEQ ID NO: 1213)
MKLPVRLLVLMFWIPASSSDVVMTQTPLSLPVSLGDQASISCRSSQSLVHSNGNTYLHWYLQKPGQSPKLLIYKVSN
RFSGVPDRFSGSGSGTDFTLKISRVEAEDLGVYFCSQKTHVPWTEGGGTKLEIK
Mouse antibody 1E4 light chain variable framework 1 (FW1) sequence:
(DNA)
(SEQ ID NO: 1214)
GATGTTGTGATGACCCAAACTCCACTCTCCCTGCCTGTCAGTCTTGGAGATCAAGCCTCCATCTCTTGC
(amino acids)
(SEQ ID NO: 1215)
DVVMTQTPLSLPVSLGDQASISC
Mouse antibody 1E4 light chain variable complementarity determining regions 1
(CDR1) sequence:
(DNA)
(SEQ ID NO: 1216)
AGATCTAGTCAGAGCCTTGTACACAGTAATGGAAACACCTATTTACAT
(amino acids)
(SEQ ID NO: 1217)
RSSQSLVHSNGNTYLH
Mouse antibody 1E4 light chain variable framework 2 (FW2) sequence:
(DNA)
(SEQ ID NO: 1218)
TGGTACCTGCAGAAGCCAGGCCAGTCTCCAAAGCTCCTGATCTAC
(amino acids)
(SEQ ID NO: 1219)
WYLQKPGQSPKLLIY
Mouse antibody 1E4 light chain variable complementarity determining regions 2
(CDR2) sequence:
(DNA)
(SEQ ID NO: 1220)
AAAGTTTCCAACCGATTTTCT
(amino acids)
(SEQ ID NO: 1221)
KVSNRFS
Mouse antibody 1E4 light chain variable framework 3 (FW3) sequence:
(DNA)
(SEQ ID NO: 1222)
GGGGTCCCAGACAGGTTCAGTGGCAGTGGATCAGGGACAGATTTCACACTCAAGATCAGCAGAGTGGAGGCTGAGGA
TCTGGGAGTTTATTTCTGC
(amino acids)
(SEQ ID NO: 1223)
GVPDRFSGSGSGTDFTLKISRVEAEDLGVYFC
Mouse antibody 1E4 light chain variable complementarity determining regions 3
(CDR3) sequence:
(DNA)
(SEQ ID NO: 1224)
TCTCAAAAAACACATGTTCCGTGGACG
(amino acids)
(SEQ ID NO: 1225)
SQKTHVPWT
Mouse antibody 1E4 light chain variable framework 4 (FW4) sequence:
(DNA)
(SEQ ID NO: 1226)
TTCGGTGGAGGCACCAAGCTGGAAATCAAA
(amino acids)
(SEQ ID NO: 1227)
FGGGTKLEIK
Mouse antibody 29H1 Heavy chain: DNA sequence (411 bp)
Signal sequence-FR1-CDR1-FR2-CDR2-FR3-CDR3-FR4
(SEQ ID NO: 1227)
ATGTACTTGGGACTGAACTATGTATTCATAGTTTTTCTCTTAAATGGTGTCCAGAGTGAAGTGAAGCTTGAGGAGTC
TGGAGGAGGCTTGGTACAACCTGGAGGATCCATGAAACTCTCTTGTGCTGCCTCTGGATTCACTTTTAGTGACGCCT
GGATGGACTGGGTCCGCCAGTCTCCAGAGAAGGGGCTTGAATGGGTTGCTGAAATTAGAAGCAAAGCTACTAATCAT
GCAACATACTATGCTGAGTCTGTGAAAGGGAGGTTCACCATCTCAAGAGATGATTCCAAAAGTAGTGTCTACCTGCA
AATGAACAGCTTAAGAGCTGAAGACACTGGCATTTATTACTGTACCCCCCTACTTTACGGGTTTGCTTACTGGGGCC
AAGGGACTCTGGTCACTGTCTCTGCA
Mouse antibody 29H1 Heavy chain: Amino acid sequence (137 aa)
Signal peptide-FR1-CDR1-FR2-CDR2-FR3-CDR3-FR4
(SEQ ID NO: 1229)
MYLGLNYVFIVELLNGVQSEVKLEESGGGLVQPGGSMKLSCAASGFTESDAWMDWVRQSPEKGLEWVAEIRSKATNH
ATYYAESVKGRFTISRDDSKSSVYLQMNSLRAEDTGIYYCTPLLYGFAYWGQGTLVTVSA
Mouse antibody 29H1 heavy chain variable framework 1 (FW1) sequence:
(DNA)
(SEQ ID NO: 1230)
GAAGTGAAGCTTGAGGAGTCTGGAGGAGGCTTGGTACAACCTGGAGGATCCATGAAACTCTCTTGTGCTGCCTCTGG
ATTCACTTTTAGT
(amino acids)
(SEQ ID NO: 1231)
EVKLEESGGGLVQPGGSMKLSCAASGFTFS
Mouse antibody 29H1 heavy chain variable complementarity determining regions
1 (CDR1) sequence:
(DNA)
(SEQ ID NO: 1232)
GACGCCTGGATGGAC
(amino acids)
(SEQ ID NO: 1233)
DAWMD
Mouse antibody 29H1 heavy chain variable framework 2 (FW2) sequence:
(DNA)
(SEQ ID NO: 1234)
TGGGTCCGCCAGTCTCCAGAGAAGGGGCTTGAATGGGTTGCT
(amino acids)
(SEQ ID NO: 1235)
WVRQSPEKGLEWVA
Mouse antibody 29H1 heavy chain variable complementarity determining regions
2 (CDR2) sequence:
(DNA)
(SEQ ID NO: 1236)
GAAATTAGAAGCAAAGCTACTAATCATGCAACATACTATGCTGAGTCTGTGAAAGGG
(amino acids)
(SEQ ID NO: 1237)
EIRSKATNHATYYAESVKG
Mouse antibody 29H1 heavy chain variable framework 3 (FW3) sequence:
(DNA)
(SEQ ID NO: 1238)
AGGTTCACCATCTCAAGAGATGATTCCAAAAGTAGTGTCTACCTGCAAATGAACAGCTTAAGAGCTGAAGACACTGG
CATTTATTACTGTACCCCC
(amino acids)
(SEQ ID NO: 1239)
RFTISRDDSKSSVYLQMNSLRAEDTGIYYCTP
Mouse antibody 29H1 heavy chain variable complementarity determining regions
3 (CDR3) sequence:
(DNA)
(SEQ ID NO: 1240)
CTACTTTACGGGTTTGCTTAC
(amino acids)
(SEQ ID NO: 1241)
LLYGFAY
Mouse antibody 29H1 heavy chain variable framework 4 (FW4) sequence:
(DNA)
(SEQ ID NO: 1242)
TGGGGCCAAGGGACTCTGGTCACTGTCTCTGCA
(amino acids)
(SEQ ID NO: 1243)
WGQGTLVTVSA
Mouse antibody 29H1 Light chain: DNA sequence (393 bp)
Signal sequence-FR1-CDR1-FR2-CDR2-FR3-CDR3-FR4
(SEQ ID NO: 1244)
ATGAAGTTGCCTGTTAGGCTGTTGGTGCTGATGTTCTGGATTCCTGCTTCCAGCAGTGATGTTGTGATGACCCAAAC
TCCACTCTCCCTGCCTGTCAGTCTTGGAGATCAAGCCTCCATCTCTTGCAGATCTGGTCAGAGCCTTGTACACAGTA
ATGGACACACCTATTTACATTGGTACCTGCAGAAGCCAGGCCAGTCTCCAAGGCTCCTGATCTACAAAGTTTCCAAC
CGATTTTCTGGGGTCCCAGACAGGTTCAGTGGCAGTGGATCAAGGGCAGATTTCACACTCAAGATCAGCAGAGTGGA
GGCTGAGGATCTGGGAGTTTATTTCTGCTCTCAAACTACACATGTTCCGTGGACGTTCGGTGGAGGCACCAAGCTGG
AAATCAAA
Mouse antibody 29H1 Light chain: Amino acid sequence (131 aa)
Signal peptide-FR1-CDR1-FR2-CDR2-FR3-CDR3-FR4
(SEQ ID NO: 1245)
MKLPVRLLVLMFWIPASSSDVVMTQTPLSLPVSLGDQASISCRSGQSLVHSNGHTYLHWYLQKPGQSPRLLIYKVSN
RFSGVPDRFSGSGSRADFTLKISRVEAEDLGVYFCSQTTHVPWTFGGGTKLEIK
Mouse antibody 29H1 light chain variable framework 1 (FW1) sequence:
(DNA)
(SEQ ID NO: 1246)
GATGTTGTGATGACCCAAACTCCACTCTCCCTGCCTGTCAGTCTTGGAGATCAAGCCTCCATCTCTTGC
(amino acids)
(SEQ ID NO: 1247)
DVVMTQTPLSLPVSLGDQASISC
Mouse antibody 29H1 light chain variable complementarity determining regions
1 (CDR1) sequence:
(DNA)
(SEQ ID NO: 1248)
AGATCTGGTCAGAGCCTTGTACACAGTAATGGACACACCTATTTACAT
(amino acids)
(SEQ ID NO: 1249)
RSGQSLVHSNGHTYLH
Mouse antibody 29H1 light chain variable framework 2 (FW2) sequence:
(DNA)
(SEQ ID NO: 1250)
TGGTACCTGCAGAAGCCAGGCCAGTCTCCAAGGCTCCTGATCTAC
(amino acids)
(SEQ ID NO: 1251)
WYLQKPGQSPRLLIY
Mouse antibody 29H1 light chain variable complementarity determining regions
2 (CDR2) sequence:
(DNA)
(SEQ ID NO: 1252)
AAAGTTTCCAACCGATTTTCT
(amino acids)
(SEQ ID NO: 1253)
KVSNRFS
Mouse antibody 29H1 light chain variable framework 3 (FW3) sequence:
(DNA)
(SEQ ID NO: 1254)
GGGGTCCCAGACAGGTTCAGTGGCAGTGGATCAAGGGCAGATTTCACACTCAAGATCAGCAGAGTGGAGGCTGAGGA
TCTGGGAGTTTATTTCTGC
(amino acids)
(SEQ ID NO: 1255)
GVPDRFSGSGSRADFTLKISRVEAEDLGVYFC
Mouse antibody 29H1 light chain variable complementarity determining regions
3 (CDR3) sequence:
(DNA)
(SEQ ID NO: 1256)
TCTCAAACTACACATGTTCCGTGGACG
(amino acids)
(SEQ ID NO: 1257)
SQTTHVPWT
Mouse antibody 29H1 light chain variable framework 4 (FW4) sequence:
(DNA)
(SEQ ID NO: 1258)
TTCGGTGGAGGCACCAAGCTGGAAATCAAA
(amino acids)
(SEQ ID NO: 1259)
FGGGTKLEIK
Mouse antibody 31A1 Heavy chain: DNA sequence (399 bp)
Signal sequence-FR1-CDR1-FR2-CDR2-FR3-CDR3-FR4
(SEQ ID NO: 1260)
ATGGAAAGGCACTGGATCTTTCTCTTCCTGTTTTCAGTAACTGCAGGTGTCCACTCCCAGGTCCAGCTTCAGCAGTC
TGGGGCTGAACTGGCAAAACCTGGGGCCTCAGTGAAGATGTCCTGCAAGGCTTCTGGCTACACCTTTACTAGCTACT
GGATGCACTGGGTAAAACAGAGGCCTGGACAGGGTCTGGAATGGATTGGATACATTAATCCTAGCACTGGTTATACT
GAGTACAATCAGAAGTTCAAGGACAAGGCCACATTGACTGCAGACAAATCCTCCAGCACAGCCTACATGCAACTGAG
CAGCCTGACATCTGAGGACTCTGCAGTCTATTACTGTGCAAGAGCCTACATTGACTACTGGGGCCAAGGCACCACTC
TCACAGTCTCCTCA
Mouse antibody 31A1 Heavy chain: Amino acid sequence (133 aa)
Signal peptide-FR1-CDR1-FR2-CDR2-FR3-CDR3-FR4
(SEQ ID NO: 1261)
MERHWIFLFLFSVTAGVHSQVQLQQSGAELAKPGASVKMSCKASGYTFTSYWMHWVKQRPGQGLEWIGYINPSTGYT
EYNQKFKDKATLTADKSSSTAYMQLSSLTSEDSAVYYCARAYIDYWGQGTTLTVSS
Mouse antibody 31A1 heavy chain variable framework 1 (FW1) sequence:
(DNA)
(SEQ ID NO: 1262)
CAGGTCCAGCTTCAGCAGTCTGGGGCTGAACTGGCAAAACCTGGGGCCTCAGTGAAGATGTCCTGCAAGGCTTCTGG
CTACACCTTTACT
(amino acids)
(SEQ ID NO: 1263)
QVQLQQSGAELAKPGASVKMSCKASGYTFT
Mouse antibody 31A1 heavy chain variable complementarity determining regions
1 (CDR1) sequence:
(DNA)
(SEQ ID NO: 1264)
AGCTACTGGATGCAC
(amino acids)
(SEQ ID NO: 1265)
SYWMH
Mouse antibody 31A1 heavy chain variable framework 2 (FW2) sequence:
(DNA)
(SEQ ID NO: 1266)
TGGGTAAAACAGAGGCCTGGACAGGGTCTGGAATGGATTGGA
(amino acids)
(SEQ ID NO: 1267)
WVKQRPGQGLEWIG
Mouse antibody 31A1 heavy chain variable complementarity determining regions
2 (CDR2) sequence:
(DNA)
(SEQ ID NO: 1268)
TACATTAATCCTAGCACTGGTTATACTGAGTACAATCAGAAGTTCAAGGAC
(amino acids)
(SEQ ID NO: 1269)
YINPSTGYTEYNQKFKD
Mouse antibody 31A1 heavy chain variable framework 3 (FW3) sequence:
(DNA)
(SEQ ID NO: 1270)
AAGGCCACATTGACTGCAGACAAATCCTCCAGCACAGCCTACATGCAACTGAGCAGCCTGACATCTGAGGACTCTGC
AGTCTATTACTGTGCAAGA
(amino acids)
(SEQ ID NO: 1271)
KATLTADKSSSTAYMQLSSLTSEDSAVYYCAR
Mouse antibody 31A1 heavy chain variable complementarity determining regions
3 (CDR3) sequence:
(DNA)
(SEQ ID NO: 1272)
GCCTACATTGACTAC
(amino acids)
(SEQ ID NO: 1273)
AYIDY
Mouse antibody 31A1 heavy chain variable framework 4 (FW4) sequence:
(DNA)
(SEQ ID NO: 1274)
TGGGGCCAAGGCACCACTCTCACAGTCTCCTCA
(amino acids)
(SEQ ID NO: 1275)
WGQGTTLTVSS
Mouse antibody 31A1 Light chain: DNA sequence (393 bp)
Signal sequence-FR1-CDR1-FR2-CDR2-FR3-CDR3-FR4
(SEQ ID NO: 1276)
ATGAAGTTGCCTGTTAGGCTGTTGGTGCTGATGTTCTGGATTCCTGCTTCCAGCAGTGATGTTTTGATGACCCAAAC
TCCACTCTCCCTGCCTGTCAGTCTTGGAGATCAAGCCTCCTTCTCTTGCAGATCTAGTCAGAGCATTGTACATAGTA
ATGGAAACACCTATTTAGAATGGTACCTGCAGAAACCAGGCCAGTCTCCAAAGCTCCTGATCTACAAAGTTTCCAAC
CGATTTTCTGGGGTCCCAGACAGGTTCAGTGGCAGTGGATCAGGGACAGATTTCACACTCAAGATCAACAGAGTGGA
GGCTGAGGATCTGGGAGTTTATTACTGCTTTCAAGTTTCACATTTTCCGTGGACGTTCGGTGGAGGCACCAAGCTGG
AAATCAAA
Mouse antibody 31A1 Light chain: Amino acid sequence (131 aa)
Signal peptide-FR1-CDR1-FR2-CDR2-FR3-CDR3-FR4
(SEQ ID NO: 1277)
MKLPVRLLVLMFWIPASSSDVLMTQTPLSLPVSLGDQASFSCRSSQSIVHSNGNTYLEWYLQKPGQSPKLLIYKVSN
RFSGVPDRFSGSGSGTDFTLKINRVEAEDLGVYYCFQVSHFPWTFGGGTKLEIK
Mouse antibody 31A1 light chain variable framework 1 (FW1) sequence:
(DNA)
(SEQ ID NO: 1278)
GATGTTTTGATGACCCAAACTCCACTCTCCCTGCCTGTCAGTCTTGGAGATCAAGCCTCCTTCTCTTGC
(amino acids)
(SEQ ID NO: 1279)
DVLMTQTPLSLPVSLGDQASFSC
Mouse antibody 31A1 light chain variable complementarity determining regions
1 (CDR1) sequence:
(DNA)
(SEQ ID NO: 1280)
AGATCTAGTCAGAGCATTGTACATAGAAATGGAAACACCTATTTAGAA
(amino acids)
RSSQSIVHRNGNTYLE
(SEQ ID NO: 1281)
Mouse antibody 31A1 light chain variable framework 2 (FW2) sequence:
(DNA)
(SEQ ID NO: 1282)
TGGTACCTGCAGAAACCAGGCCAGTCTCCAAAGCTCCTGATCTAC
(amino acids)
(SEQ ID NO: 1283)
WYLQKPGQSPKLLIY
Mouse antibody 31A1 light chain variable complementarity determining regions
2 (CDR2) sequence:
(DNA)
(SEQ ID NO: 1284)
AAAGTTTCCAACCGATTTTCT
(amino acids)
(SEQ ID NO: 1285)
KVSNRFS
Mouse antibody 31A1 light chain variable framework 3 (FW3) sequence:
(DNA)
(SEQ ID NO: 1286)
GGGGTCCCAGACAGGTTCAGTGGCAGTGGATCAGGGACAGATTTCACACTCAAGATCAACAGAGTGGAGGCTGAGGA
TCTGGGAGTTTATTACTGC
(amino acids)
(SEQ ID NO: 1287)
GVPDRFSGSGSGTDFTLKINRVEAEDLGVYYC
Mouse antibody 31A1 light chain variable complementarity determining regions
3 (CDR3) sequence:
(DNA)
(SEQ ID NO: 1288)
TTTCAAGTTTCACATTTTCCGTGGACG
(amino acids)
(SEQ ID NO: 1289)
FQVSHFPWT
Mouse antibody 31A1 light chain variable framework 4 (FW4) sequence:
(DNA)
(SEQ ID NO: 1290)
TTCGGTGGAGGCACCAAGCTGGAAATCAAA
(amino acids)
(SEQ ID NO: 1291)
FGGGTKLEIK
Mouse antibody 32C1 Heavy chain: DNA sequence (411 bp)
Signal sequence-FR1-CDR1-FR2-CDR2-FR3-CDR3-FR4
(SEQ ID NO: 1292)
ATGTACTTGGGACTGAACTGTGTATTCATAGTTTTTCTCTTAAAAGGTGTCCAGAGTGAAGTGAAGCTTGAGGAGTC
TGGAGGAGGCTTGGTGCAATCTGGAGGATCCATGAAACTCTCCTGTGTTGCCTCTGGATTCACTTTCAGTAATTACT
GGATGAACTGGGTCCGCCAGTCTCCAGAGAAGGGGCTTGAGTGGGTTGCTGAAATTAGATTGAAATCTAATAATTAT
GCAATACATTATGCGGAGTCTGTGAAGGGGAGGTTCACCATCTCAAGAGATGATTCCAAAAGTAGTGTCTACCTGCA
AATGAACAACTTAAGAGCTGAAGACACTGGCATTTATTACTGTACCAGGGTCCCGGGACTGGATGCTTACTGGGGCC
AAGGGACTCTGGTCACTGTCTCTGCA
Mouse antibody 32C1 Heavy chain: Amino acid sequence (137 aa)
Signal peptide-FR1-CDR1-FR2-CDR2-FR3-CDR3-FR4
(SEQ ID NO: 1293)
MYLGLNCVFIVELLKGVQSEVKLEESGGGLVQSGGSMKLSCVASGFTESNYWMNWVRQSPEKGLEWVAEIRLKSNNY
AIHYAESVKGRFTISRDDSKSSVYLQMNNLRAEDTGIYYCTRVPGLDAYWGQGTLVTVSA
Mouse antibody 32C1 heavy chain variable framework 1 (FW1) sequence:
(DNA)
(SEQ ID NO: 1294)
GAAGTGAAGCTTGAGGAGTCTGGAGGAGGCTTGGTGCAATCTGGAGGATCCATGAAACTCTCCTGTGTTGCCTCTGG
ATTCACTTTCAGT
(amino acids)
(SEQ ID NO: 1295)
EVKLEESGGGLVQSGGSMKLSCVASGFTFS
Mouse antibody 32C1 heavy chain variable complementarity determining regions
1 (CDR1) sequence:
(DNA)
(SEQ ID NO: 1296)
AATTACTGGATGAAC
(amino acids)
(SEQ ID NO: 1297)
NYWMN
Mouse antibody 32C1 heavy chain variable framework 2 (FW2) sequence:
(DNA)
(SEQ ID NO: 1298)
TGGGTCCGCCAGTCTCCAGAGAAGGGGCTTGAGTGGGTTGCT
(amino acids)
(SEQ ID NO: 1299)
WVRQSPEKGLEWVA
Mouse antibody 32C1 heavy chain variable complementarity determining regions
2 (CDR2) sequence:
(DNA)
(SEQ ID NO: 1300)
GAAATTAGATTGAAATCTAATAATTATGCAATACATTATGCGGAGTCTGTGAAGGGG
(amino acids)
(SEQ ID NO: 1301)
EIRLKSNNYAIHYAESVKG
Mouse antibody 32C1 heavy chain variable framework 3 (FW3) sequence:
(DNA)
(SEQ ID NO: 1302)
AGGTTCACCATCTCAAGAGATGATTCCAAAAGTAGTGTCTACCTGCAAATGAACAACTTAAGAGCTGAAGACACTGG
CATTTATTACTGTACCAGG
(amino acids)
(SEQ ID NO: 1303)
RFTISRDDSKSSVYLQMNNLRAEDTGIYYCTR
Mouse antibody 32C1 heavy chain variable complementarity determining regions
3 (CDR3) sequence:
(DNA)
(SEQ ID NO: 1304)
GTCCCGGGACTGGATGCTTAC
(amino acids)
(SEQ ID NO: 1305)
VPGLDAY
Mouse antibody 32C1 heavy chain variable framework 4 (FW4) sequence:
(DNA)
(SEQ ID NO: 1306)
TGGGGCCAAGGGACTCTGGTCACTGTCTCTGCA
(amino acids)
(SEQ ID NO: 1307)
WGQGTLVTVSA
Mouse antibody 32C1 Light chain: DNA sequence (393 bp)
Signal sequence-FR1-CDR1-FR2-CDR2-FR3-CDR3-FR4
(SEQ ID NO: 1308)
ATGAAGTTGCCTGTTAGGCTGTTGGTGCTGATGTTCTGGATTCCTGCTTCCAGCAGTGATGTTGTGATGACCCAAAC
TCCACTCTCCCTGCCTGTCAGTCTTGGAGATCAAGCCTCCATCTCTTGCAGATCTAGTCAGAGCCTTGTACACAGTA
ATGGAAACACCTATTTACATTGGTACCTGCAGAAGCCAGGCCAGTCTCCAAAGCTCCTGATCTACAAAGTTTCCAAC
CGATTTTCTGGGGTCCCAGACAGGTTCAGTGGCAGTGGATCAGGGACAGATTTCACACTCAAGATCAGCAGTGTGGA
GGCTGAGGATCTGGGAGTTTATTTCTGCTCTCAAATTACACATGTTCCGTACACGTTCGGAGGGGGGACCAATCTGG
AAATAAAA
Mouse antibody 32C1 Light chain: Amino acid sequence (131 aa)
Signal peptide-FR1-CDR1-FR2-CDR2-FR3-CDR3-FR4
(SEQ ID NO: 1309)
MKLPVRLLVLMFWIPASSSDVVMTQTPLSLPVSLGDQASISCRSSQSLVHSNGNTYLHWYLQKPGQSPKLLIYKVSN
RFSGVPDRFSGSGSGTDFTLKISSVEAEDLGVYFCSQITHVPYTFGGGTNLEIK
Mouse antibody 32C1 light chain variable framework 1 (FW1) sequence:
(DNA)
(SEQ ID NO: 1310)
GATGTTGTGATGACCCAAACTCCACTCTCCCTGCCTGTCAGTCTTGGAGATCAAGCCTCCATCTCTTGC
(amino acids)
(SEQ ID NO: 1311)
DVVMTQTPLSLPVSLGDQASISC
Mouse antibody 32C1 light chain variable complementarity determining regions
1 (CDR1) sequence:
(DNA)
(SEQ ID NO: 1312)
AGATCTAGTCAGAGCCTTGTACACAGTAATGGAAACACCTATTTACAT
(amino acids)
(SEQ ID NO: 1313)
RSSQSLVHSNGNTYLH
Mouse antibody 32C1 light chain variable framework 2 (FW2) sequence:
(DNA)
(SEQ ID NO: 1314)
TGGTACCTGCAGAAGCCAGGCCAGTCTCCAAAGCTCCTGATCTAC
(amino acids)
(SEQ ID NO: 1315)
WYLQKPGQSPKLLIY
Mouse antibody 32C1 light chain variable complementarity determining regions
2 (CDR2) sequence:
(DNA)
(SEQ ID NO: 1316)
AAAGTTTCCAACCGATTTTCT
(aminoacids)
(SEQ ID NO: 1317)
KVSNRFS
Mouse antibody 32C1 light chain variable framework 3 (FW3) sequence:
(DNA)
(SEQ ID NO: 1318)
GGGGTCCCAGACAGGTTCAGTGGCAGTGGATCAGGGACAGATTTCACACTCAAGATCAGCAGTGTGGAGGCTGAGGA
TCTGGGAGTTTATTTCTGC
(amino acids)
(SEQ ID NO: 1319)
GVPDRFSGSGSGTDFTLKISSVEAEDLGVYFC
Mouse antibody 32C1 light chain variable complementarity determining regions
3 (CDR3) sequence:
(DNA)
(SEQ ID NO: 1320)
TCTCAAATTACACATGTTCCGTACACG
(amino acids)
(SEQ ID NO: 1321)
SQITHVPYT
Mouse antibody 32C1 light chain variable framework 4 (FW4) sequence:
(DNA)
(SEQ ID NO: 1322)
TTCGGAGGGGGGACCAATCTGGAAATAAAA
(amino acids)
(SEQ ID NO: 1323)
FGGGTNLEIK
Mouse antibody 45C11 Heavy chain: DNA sequence (423 bp)
Signal sequence-FR1-CDR1-FR2-CDR2-FR3-CDR3-FR4
(SEQ ID NO: 1324)
ATGAAATGCAGCTGGGTTATCTTCTTCCTGATGGCAGTGGTTACAGGGGTCAATTCAGAGGTTCAGCTGCAGCAGTC
TGGGGCAGACCTTGTGAAGCCAGGGGCCTCAGTCAAGTTGTCCTGCACAGCTTCTGGCTTCAACATTAAAGACACCT
TTATGCACTGGGTGAAGCAGAGGCCTGAACAGGGCCTGGAGTGGATTGGAAGGATTGATCCTGCGAATGGTAATACT
AAATATGACCCGAAATTCCAGGGCAAGGCCACTATAACAGCAGACACATCCTCCAACACAGCCTACCTGCAGCTCAG
CAGCCTGACATCTGAGGACACTGCCGTCTATTACTGTGCTAAACCGTATGGTAACTACGGCTATTACTATGCTTTGG
ACTACTGGGGTCAAGGAACCTCAGTCACCGTCTCCTCA
Mouse antibody 45C11 Heavy chain: Amino acid sequence (141 aa)
Signal peptide-FR1-CDR1-FR2-CDR2-FR3-CDR3-FR4
(SEQ ID NO: 1325)
MKCSWVIFFLMAVVTGVNSEVQLQQSGADLVKPGASVKLSCTASGENIKDTFMHWVKQRPEQGLEWIGRIDPANGNT
KYDPKFQGKATITADTSSNTAYLQLSSLTSEDTAVYYCAKPYGNYGYYYALDYWGQGTSVTVSS
Mouse antibody 45C11 heavy chain variable framework 1 (FW1) sequence:
(DNA)
(SEQ ID NO: 1326)
GAGGTTCAGCTGCAGCAGTCTGGGGCAGACCTTGTGAAGCCAGGGGCCTCAGTCAAGTTGTCCTGCACAGCTTCTGG
CTTCAACATTAAA
(amino acids)
(SEQ ID NO: 1327)
EVQLQQSGADLVKPGASVKLSCTASGFNIK
Mouse antibody 45C11 heavy chain variable complementarity determining regions
1 (CDR1) sequence:
(DNA)
(SEQ ID NO: 1328)
GACACCTTTATGCAC
(amino acids)
(SEQ ID NO: 1329)
DTFMH
Mouse antibody 45C11 heavy chain variable framework 2 (FW2) sequence:
(DNA)
(SEQ ID NO: 1330)
TGGGTGAAGCAGAGGCCTGAACAGGGCCTGGAGTGGATTGGA
(amino acids)
(SEQ ID NO: 1331)
WVKQRPEQGLEWIG
Mouse antibody 45C11 heavy chain variable complementarity determining regions
2 (CDR2) sequence:
(DNA)
(SEQ ID NO: 1332)
AGGATTGATCCTGCGAATGGTAATACTAAATATGACCCGAAATTCCAGGGC
(amino acids)
(SEQ ID NO: 1333)
RIDPANGNTKYDPKFQG
Mouse antibody 45C11 heavy chain variable framework 3 (FW3) sequence:
(DNA)
(SEQ ID NO: 1334)
AAGGCCACTATAACAGCAGACACATCCTCCAACACAGCCTACCTGCAGCTCAGCAGCCTGACATCTGAGGACACTGC
CGTCTATTACTGTGCTAAA
(amino acids)
(SEQ ID NO: 1335)
KATITADTSSNTAYLQLSSLTSEDTAVYYCAK
Mouse antibody 45C11 heavy chain variable complementarity determining regions
3 (CDR3) sequence:
(DNA)
(SEQ ID NO: 1336)
CCGTATGGTAACTACGGCTATTACTATGCTTTGGACTAC
(amino acids)
(SEQ ID NO: 1337)
PYGNYGYYYALDY
Mouse antibody 45C11 heavy chain variable framework 4 (FW4) sequence:
(DNA)
(SEQ ID NO: 1338)
TGGGGTCAAGGAACCTCAGTCACCGTCTCCTCA
(amino acids)
(SEQ ID NO: 1339)
WGQGTSVTVSS
Mouse antibody 45C11 Light chain: DNA sequence (381 bp)
Signal sequence-FR1-CDR1-FR2-CDR2-FR3-CDR3-FR4
(SEQ ID NO: 1340)
ATGAGGTTCCAGGTTCAGGTTCTGGGGCTCCTTCTGCTCTGGATATCAGGTGCCCAGTGTGATGTCCAGATAACCCA
GTCTCCATCTTATCTTGCTGCATCTCCTGGAGAAACCATTACTATTAATTGCAGGGCAAGTAAGAGCATTAGCAAAT
ATTTAGCCTGGTATCAAGAGAAACCTGGGAAAACTAATAAGCTTCTTATCTACTCTGGATCCACTTTGCAATCTGGA
ATTCCATCAAGGTTCAGTGGCAGTGGATCTGGTACAGATTTCACTCTCACCATCAGTAGCCTGGAGCCTGAAGATTT
TGCAATGTATTACTGTCAACAGCATAATGAATTCCCGTGGACGTTCGGTGGAGGCACCAAGCTGGAAATCAAA
Mouse antibody 45C11 Light chain: Amino acid sequence (127 aa)
Signal peptide-FR1-CDR1-FR2-CDR2-FR3-CDR3-FR4
(SEQ ID NO: 1341)
MRFQVQVLGLLLLWISGAQCDVQITQSPSYLAASPGETITINCRASKSISKYLAWYQEKPGKTNKLLIYSGSTLQSG
IPSRFSGSGSGTDFTLTISSLEPEDFAMYYCQQHNEFPWTEGGGTKLEIK
Mouse antibody 45C11 light chain variable framework 1 (FW1) sequence:
(DNA)
(SEQ ID NO: 1342)
GATGTCCAGATAACCCAGTCTCCATCTTATCTTGCTGCATCTCCTGGAGAAACCATTACTATTAATTGC
(amino acids)
(SEQ ID NO: 1343)
DVQITQSPSYLAASPGETITINC
Mouse antibody 45C11 light chain variable complementarity determining regions
1 (CDR1) sequence:
(DNA)
(SEQ ID NO: 1344)
AGGGCAAGTAAGAGCATTAGCAAATATTTAGCC
(amino acids)
(SEQ ID NO: 1345)
RASKSISKYLA
Mouse antibody 45C11 light chain variable framework 2 (FW2) sequence:
(DNA)
(amino acids)
(SEQ ID NO: 1346)
TGGTATCAAGAGAAACCTGGGAAAACTAATAAGCTTCTTATCTAC
(amino acids)
(SEQ ID NO: 1347)
WYQEKPGKTNKLLIY
Mouse antibody 45C11 light chain variable complementarity determining regions
2 (CDR2) sequence:
(DNA)
(SEQ ID NO: 1348)
TCTGGATCCACTTTGCAATCT
(amino acids)
(SEQ ID NO: 1349)
SGSTLQS
Mouse antibody 45C11 light chain variable framework 3 (FW3) sequence:
(DNA)
(SEQ ID NO: 1350)
GGAATTCCATCAAGGTTCAGTGGCAGTGGATCTGGTACAGATTTCACTCTCACCATCAGTAGCCTGGAGCCTGAAGA
TTTTGCAATGTATTACTGT
(amino acids)
(SEQ ID NO: 1351)
GIPSRFSGSGSGTDFTLTISSLEPEDFAMYYC
Mouse antibody 45C11 light chain variable complementarity determining regions
3 (CDR3) sequence:
(DNA)
(SEQ ID NO: 1352)
CAACAGCATAATGAATTCCCGTGGACG
(amino acids)
(SEQ ID NO: 1353)
QQHNEFPWT
Mouse antibody 45C11 light chain variable framework 4 (FW4) sequence:
(DNA)
(SEQ ID NO: 1354)
TTCGGTGGAGGCACCAAGCTGGAAATCAAA
(amino acids)
(SEQ ID NO: 1355)
FGGGTKLEIK
5C6F3
Mouse 5C6F3 heavy chain variable framework 1 (FW1) sequence:
(DNA)
(SEQ ID NO: 1356)
Gaagtgatgctggtggagtctgggggaggcttagtgaagcctggagggtccctgaaactctcctgtgcagcctctgg
attcactttcagt
(amino acids)
(SEQ ID NO: 1357)
EVMLVESGGGLVKPGGSLKLSCAASGFTES
Mouse 5C6F3 heavy chain variable complementarity determining regions 1 (CDR1)
sequence:
(DNA)
(SEQ ID NO: 1358)
acctatgccatgtct
(amino acids)
(SEQ ID NO: 1359)
TYAMS
Mouse 5C6F3 heavy chain variable framework 2 (FW2) sequence:
(DNA)
(SEQ ID NO: 1360)
tgggttcgccagactccggagaagaggctggagtgggtcgca
(amino acids)
(SEQ ID NO: 1361)
WVRQTPEKRLEWVA
Mouse 5C6F3 heavy chain variable complementarity determining regions 2 (CDR2)
sequence:
(DNA)
(SEQ ID NO: 1362)
gccattagtaatggtggtggttacacctactatccagacagtctgaagggg
(amino acids)
(SEQ ID NO: 1363)
AISNGGGYTYYPDSLKG
Mouse 5C6F3 heavy chain variable framework 3 (FW3) sequence:
(DNA)
(SEQ ID NO: 1364)
cgattcaccatctccagagacaatgccaagaacaccctgtacctgcaaatgagcagtctgaggtctgaggacacggc
cacgtattactgtgcaaga
(amino acids)
(SEQ ID NO: 1365)
RFTISRDNAKNTLYLQMSSLRSEDTATYYCAR
Mouse 5C6F3 heavy chain variable complementarity determining regions 3 (CDR3)
sequence:
(DNA)
(SEQ ID NO: 1366)
cgttactatgatcactactttgactac
(amino acids)
(SEQ ID NO: 1367)
RYYDHYFDY
Mouse 5C6F3 heavy chain variable framework 4 (FW4) sequence:
(DNA)
(SEQ ID NO: 1368)
tggggccaaggcaccgctctcacggtctcctca
(amino acids)
(SEQ ID NO: 1369)
WGQGTALTVSS
Mouse 5C6F3 light chain variable framework 1 (FR1) sequence:
(DNA)
(SEQ ID NO: 1370)
gatgttttgatgacccaaactccactctccctgcctgtcagtcttggagatcaagcctccatctcttgc
(amino acids)
(SEQ ID NO: 1371)
DVLMTQTPLSLPVSLGDQASISC
Mouse 5C6F3 light chain variable complementarity determining regions 1 (CDR1)
sequence:
(DNA)
(SEQ ID NO: 1372)
agatctagtcagaccattgtacatagtaatggaaacacctatttagaa
(amino acids)
(SEQ ID NO: 1373)
RSSQTIVHSNGNTYLE
Mouse 5C6F3 light chain variable framework 2 (FR2) sequence:
(DNA)
(SEQ ID NO: 1374)
tggtacctgcagaaaccaggccagtctccaaagctcctgatctac
(amino acids)
(SEQ ID NO: 1375)
WYLQKPGQSPKLLIY
Mouse 5C6F3 light chain variable complementarity determining regions 2 (CDR2)
sequence:
(DNA)
(SEQ ID NO: 1376)
aaagtttccaaccgattttct
(amino acids)
(SEQ ID NO: 1377)
KVSNRFS
Mouse 5C6F3 light chain variable framework 3 (FR3) sequence:
(DNA)
(SEQ ID NO: 1378)
ggggtcccagacaggttcagtggcagtggatcagggacagatttcacactcaagatcagcagggtggaggctgagga
tctgggagtttattactgc
(amino acids)
(SEQ ID NO: 1379)
GVPDRFSGSGSGTDFTLKISRVEAEDLGVYYC
Mouse 5C6F3 light chain variable complementarity determining regions 3 (CDR3)
sequence:
(DNA)
(SEQ ID NO: 1380)
tttcaagattcacatgttcctctcacg
(amino acids)
(SEQ ID NO: 1381)
FQDSHVPLT
Mouse 5C6F3 light chain variable framework 4 (FR4) sequence:
(DNA)
(SEQ ID NO: 1382)
ttcggtgctgggaccaagctggagctgaaa
(amino acids)
(SEQ ID NO: 1383)
FGAGTKLELK
mu5C6F3 scFv- sequence
(DNA)
(SEQ ID NO: 1384)
gaagtgatgctggtggagtctgggggaggcttagtgaagcctggagggtccctgaaactctcctgtgcagcctctgg
attcactttcagtacctatgccatgtcttgggttcgccagactccggagaagaggctggagtgggtcgcagccatta
gtaatggtggtggttacacctactatccagacagtctgaaggggcgattcaccatctccagagacaatgccaagaac
accctgtacctgcaaatgagcagtctgaggtctgaggacacggccacgtattactgtgcaagacgttactatgatca
ctactttgactactggggccaaggcaccgctctcacggtctcctcaggtggcggaggatctggcggaggtggaagcg
gcggaggcggatccgatgttttgatgacccaaactccactctccctgcctgtcagtcttggagatcaagcctccatc
tcttgcagatctagtcagaccattgtacatagtaatggaaacacctatttagaatggtacctgcagaaaccaggcca
gtctccaaagctcctgatctacaaagtttccaaccgattttctggggtcccagacaggttcagtggcagtggatcag
ggacagatttcacactcaagatcagcagggtggaggctgaggatctgggagtttattactgctttcaagattcacat
gttcctctcacgttcggtgctgggaccaagctggagctgaaa
(amino acids)
(SEQ ID NO: 1385)
EVMLVESGGGLVKPGGSLKLSCAASGFTFSTYAMSWVRQTPEKRLEWVAAISNGGGYTYYPDSLKGRFTISRDNAKN
TLYLQMSSLRSEDTATYYCARRYYDHYFDYWGQGTALTVSSGGGGSGGGGSGGGGSDVLMTQTPLSLPVSLGDQASI
SCRSSQTIVHSNGNTYLEWYLQKPGQSPKLLIYKVSNRFSGVPDRFSGSGSGTDFTLKISRVEAEDLGVYYCFQDSH
VPLTFGAGTKLELK
3C2B1
Mouse 3C2B1 heavy chain variable framework 1 (CDR1) sequence:
(DNA)
(SEQ ID NO: 1386)
gaagtgatgctggtggagtctgggggaggcttagtgaagcctggagggtccctgaaactctcctgtgcagcctctgg
aatcactttcagt
(amino acids)
(SEQ ID NO: 1387)
EVMLVESGGGLVKPGGSLKLSCAASGITFS
Mouse 3C2B1 heavy chain variable complementarity determining regions 1 (CDR1)
sequence:
(DNA)
(SEQ ID NO: 1388)
acctataccatgtcg
(amino acids)
(SEQ ID NO: 1389)
TYTMS
Mouse 3C2B1 heavy chain variable framework 2 (CDR2) sequence:
(DNA)
(SEQ ID NO: 1390)
tgggttcgccagactccggagaagaggctggagtgggtcgca
(amino acids)
(SEQ ID NO: 1391)
WVRQTPEKRLEWVA
Mouse 3C2B1 heavy chain variable complementarity determining regions 2 (CDR2)
sequence:
(DNA)
(SEQ ID NO: 1392)
accattagtactggtggtgataaaacctactattcagacagtgtgaagggt
(amino acids)
(SEQ ID NO: 1393)
TISTGGDKTYYSDSVKG
Mouse 3C2B1 heavy chain variable framework 3 (CDR3) sequence:
(DNA)
(SEQ ID NO: 1394)
cgattcaccatctccagagacaatgccaagaacaacctgtacctccaaatgagcagtctgaggtctgaggacacggc
cttgtattactgtgcaagg
(amino acids)
(SEQ ID NO: 1395)
RFTISRDNAKNNLYLQMSSLRSEDTALYYCAR
Mouse 3C2B1 heavy chain variable complementarity determining regions 3 (CDR3)
sequence:
(DNA)
(SEQ ID NO: 1396)
ggaaccacggctatgtattactatgctatggactac
(amino acids)
(SEQ ID NO: 1397)
GTTAMYYYAMDY
Mouse 3C2B1 heavy chain variable framework 4 (CDR4) sequence:
(DNA)
(SEQ ID NO: 1398)
tggggtcaaggaacctcagtcaccgtctcctca
(amino acids)
(SEQ ID NO: 1399)
WGQGTSVTVSS
Mouse 3C2B1 light chain variable framework 1 (FW1) sequence:
(DNA)
(SEQ ID NO: 1400)
gacattgtgctgacacagtctcctgcttccttagctgtatctctggggcagagggccaccatctcatgc
(amino acids)
(SEQ ID NO: 1401)
DIVLTQSPASLAVSLGQRATISC
Mouse 3C2B1 light chain variable complementarity determining regions 1 (CDR1)
sequence:
(DNA)
(SEQ ID NO: 1402)
agggccagcaaaagtatcagtacatctgactataattatattcac
(amino acids)
(SEQ ID NO: 1403)
RASKSISTSDYNYIH
Mouse 3C2B1 light chain variable framework 2 (FW2) sequence:
(DNA)
(SEQ ID NO: 1404)
tggtaccaacagaaaccaggacagccacccaaactcctcatctat
(amino acids)
(SEQ ID NO: 1405)
WYQQKPGQPPKLLIY
Mouse 3C2B1 light chain variable complementarity determining regions 2 (CDR2)
sequence:
(DNA)
(SEQ ID NO: 1406)
CTTGCATCCAACCTAGAATCT
(amino acids)
(SEQ ID NO: 1407)
LASNLES
Mouse 3C2B1 light chain variable framework 3 (FW3) sequence:
(DNA)
(SEQ ID NO: 1408)
gggtccctgccaggttcagtggcagtgggtctgggacagacttcaccctcaacatccatcctgtggaggaagaagat
gctgcaacctattactgt
(amino acids)
(SEQ ID NO: 1409)
GVPARFSGSGSGTDFTLNIHPVEEEDAATYYC
Mouse 3C2B1 light chain variable complementarity determining regions 3 (CDR3)
sequence:
(DNA)
(SEQ ID NO: 1410)
cagcacagtagggagcttcctctcacg
(amino acids)
(SEQ ID NO: 1411)
QHSRELPLT
Mouse 3C2B1 light chain variable framework 4 (FW4) sequence:
(DNA)
(SEQ ID NO: 1412)
ttcggtgctgggaccaagctggagctgaaa
(amino acids)
(SEQ ID NO: 1413)
FGAGTKLELK
Mouse B12 heavy chain variable framework 1 (FW1) sequence:
(DNA)
(SEQ ID NO: 1414)
Caggcgcagctgaaggagtcaggacctggcctggtggcgccctcacagagcctgtccatcacttgcactgtctctgg
gttttcattaacc
(amino acids)
(SEQ ID NO: 1415)
QAQLKESGPGLVAPSQSLSITCTVSGFSLT
Mouse B12 heavy chain variable complementarity determining regions 1 (CDR1)
sequence:
(DNA)
(SEQ ID NO: 1416)
agctatggtgtacac
(amino acids)
(SEQ ID NO: 1417)
SYGVH
Mouse B12 heavy chain variable framework 2 (FW2) sequence:
(DNA)
(SEQ ID NO: 1418)
tgggttcgccagcctccaggaaagggtctggagtggctggga
(amino acids)
(SEQ ID NO: 1419)
WVRQPPGKGLEWLG
Mouse B12 heavy chain variable complementarity determining regions 2 (CDR2)
sequence:
(DNA)
(SEQ ID NO: 1420)
gtaatatggcctggtggaagcacaaattataattcgactctcatgtccagaatg
(amino acids)
(SEQ ID NO: 1421)
VIWPGGSTNYNSTLMSRM
Mouse B12 heavy chain variable framework 3 (FW3) sequence:
(DNA)
(SEQ ID NO: 1422)
cggatcatcaaagacaactccaagagccaagttttcttaaaaatgaacagtctgcaaattgatgacacagccatgta
ctactgtgccaga
(amino acids)
(SEQ ID NO: 1423)
RIIKDNSKSQVFLKMNSLQIDDTAMYYCAR
Mouse B12 heavy chain variable complementarity determining regions 3 (CDR3)
sequence:
(DNA)
(SEQ ID NO: 1424)
gatcggacacctcgggtgggggcctggtttgcttac
(amino acids)
(SEQ ID NO: 1425)
DRTPRVGAWFAY
Mouse B12 heavy chain variable framework 4 (FW4) sequence:
(DNA)
(SEQ ID NO: 1426)
tggggccaagggactctggtcactgtctctgcag
(amino acids)
(SEQ ID NO: 1427)
WGQGTLVTVSA
Mouse B12 light chain variable framework 1 (FR1) sequence:
(DNA)
(SEQ ID NO: 1428)
atcattgtgctgacccaatctccagcttctttggctgtgtctctagggcagagggccaccatatcctgc
(amino acids)
(SEQ ID NO: 1429)
IIVLTQSPASLAVSLGQRATISC
Mouse B12 light chain variable complementarity determining regions 1 (CDR1)
Sequence:
(DNA)
(SEQ ID NO: 1430)
agagccagtgagagtgttgctacttatggcaataattttatgcag
(amino acids)
(SEQ ID NO: 1431)
RASESVATYGNNFMQ
Mouse B2 heavy chain variable framework 1 (FW1) sequence:
(DNA)
(SEQ ID NO: 1432)
gaagtggtgctggtggagtctgggggaggcttagtggagcctggagggtccctgaaactctcctgtgtagcctctgg
attcgctttcagt
(amino acids)
(SEQ ID NO: 1433)
EVVLVESGGGLVEPGGSLKLSCVASGFAFS
Mouse B2 heavy chain variable complementarity determining regions 1 (CDR1)
sequence:
(DNA)
(SEQ ID NO: 1434)
acctttgccatgtct
(amino acids)
(SEQ ID NO: 1435)
TEAMS
Mouse B2 heavy chain variable framework 2 (FW2) sequence:
(DNA)
(SEQ ID NO: 1436)
tggattcgccagactccggagaagaggctggagtgggtcgca
(amino acids)
(SEQ ID NO: 1437)
WIRQTPEKRLEWVA
Mouse B2 heavy chain variable complementarity determining regions 2 (CDR2)
sequence:
(DNA)
(SEQ ID NO: 1438)
gccattagtaatggtggtggttacacctactatccagacactctgaagggg
(amino acids)
(SEQ ID NO: 1439)
AISNGGGYTYYPDTLKG
Mouse B2 heavy chain variable framework 3 (FW3) sequence:
(DNA)
(SEQ ID NO: 1440)
cgattctccatctccagagacaatgccaagaataccctgtacctgcaaatgagtagtctgaggtctgaggacacggc
cgtgtattactgtgcaaga
(amino acids)
(SEQ ID NO: 1441)
RFSISRDNAKNTLYLQMSSLRSEDTAVYYCAR
Mouse B2 heavy chain variable complementarity determining regions 3 (CDR3)
Sequence:
(DNA)
(SEQ ID NO: 1442)
cgctactatgatctctactttgactta
(amino acids)
(SEQ ID NO: 1443)
RYYDLYFDL
Mouse B2 heavy chain variable framework 4 (FW4) sequence:
(DNA)
(SEQ ID NO: 1444)
Tggggccgaggcacctctctcatagtctcctca
(amino acids)
(SEQ ID NO: 1445)
WGRGTSLIVSS
Mouse B2 light chain variable framework 1 (FR1) sequence:
(DNA)
(SEQ ID NO: 1446)
gatattctgatgacccaaactccactctccctgcctgtcagtcttggagatcaagcctccatttcttgc
(amino acids)
(SEQ ID NO: 1447)
DILMTQTPLSLPVSLGDQASISC
Mouse B2 light chain variable complementarity determining regions 1 (CDR1)
sequence:
(DNA)
(SEQ ID NO: 1448)
agatctagtcagaacattgtacatagtaatggaaacacctatttagaa
(amino acids)
(SEQ ID NO: 1449)
RSSQNIVHSNGNTYLE
Mouse B2 light chain variable framework 2 (FR2) sequence:
(DNA)
(SEQ ID NO: 1450)
tggtacctgcagaaaccaggccagtctccaaagctcctgatctac
(amino acids)
(SEQ ID NO: 1451)
WYLQKPGQSPKLLIY
Mouse B2 light chain variable complementarity determining regions 2 (CDR2)
sequence:
(DNA)
(SEQ ID NO: 1452)
aaagtttccaaccgattttct
(amino acids)
(SEQ ID NO: 1453)
KVSNRFS
Mouse B2 light chain variable framework 3 (FR3) sequence:
(DNA)
(SEQ ID NO: 1454)
ggggtccccgacaggttcagtggtagtgggtcagggacagatttcacactcaagatcagcagagtggaggctgagga
tctgggagtttattactgc
(amino acids)
(SEQ ID NO: 1455)
GVPDRFSGSGSGTDFTLKISRVEAEDLGVYYC
Mouse B2 light chain variable complementarity determining regions 3 (CDR3)
sequence:
(DNA)
(SEQ ID NO: 1456)
tttcaagattcacatgttcctctcacg
(amino acids)
(SEQ ID NO: 1457)
FQDSHVPLT
Mouse B2 light chain variable framework 4 (FR4) sequence:
(DNA)
(SEQ ID NO: 1458)
ttcggtgctgggaccaggctggagctgaaa
(amino acids)
(SEQ ID NO: 1459)
FGAGTRLELK
Mouse B7 heavy chain variable framework 1 (FW1) sequence:
(DNA)
(SEQ ID NO: 1460)
gaggtgcaggtggtggagtctgggggagacttagtgaagcctggagggtccctgaaactctcctgtgcagcctctgg
attcactttcagt
(amino acids)
(SEQ ID NO: 1461)
EVQVVESGGDLVKPGGSLKLSCAASGFTFS
B7 heavy chain variable complementarity determining regions 1 (CDR1)
sequence:
(DNA)
(SEQ ID NO: 1462)
agatatggcatgtct
(amino acids)
(SEQ ID NO: 1463)
RYGMS
Mouse B7 heavy chain variable framework 2 (FW2) sequence:
(DNA)
(SEQ ID NO: 1464)
tgggttcgccagactccagacaagaggctggagtgggtcgca
(amino acids)
(SEQ ID NO: 1465)
WVRQTPDKRLEWVA
Mouse B7 heavy chain variable complementarity determining regions 2 (CDR2)
sequence:
(DNA)
(SEQ ID NO: 1466)
accattagtagtggtggtacttacatctactatccagacagtgtgaagggg
(amino acids)
(SEQ ID NO: 1467)
TISSGGTYIYYPDSVKG
Mouse B7 heavy chain variable framework 3 (FW3) sequence:
(DNA)
(SEQ ID NO: 1468)
cgattcaccatctccagagacaatgccaagaacaccctgtacctgcaaatgagcagtctgaagtctgaggacacagc
catgtattactgtgcaagg
(amino acids)
(SEQ ID NO: 1469)
RFTISRDNAKNTLYLQMSSLKSEDTAMYYCAR
Mouse B7 heavy chain variable complementarity determining regions 3 (CDR3)
sequence:
(DNA)
(SEQ ID NO: 1470)
gataactacggtagtagctacgactatgctatggactac
(amino acids)
(SEQ ID NO: 1471)
DNYGSSYDYAMDY
Mouse B7 heavy chain variable framework 4 (FW4) sequence:
(DNA)
(SEQ ID NO: 1472)
tggggtcaaggaacctcagtcaccgtctcctca
(amino acids)
(SEQ ID NO: 1473)
WGQGTSVTVSS
Mouse B7 light chain variable framework 1 (FR1) sequence:
(DNA)
(SEQ ID NO: 1474)
gatgttttgatgacccaaactccactctccctgcctgtcagtcttggagatcaagcctccatctcttgc
(amino acids)
(SEQ ID NO: 1475)
DVLMTQTPLSLPVSLGDQASISC
Mouse B7 light chain variable complementarity determining regions 1 (CDR1)
sequence:
(DNA)
(SEQ ID NO: 1476)
agatctagtcagaccattgtacatagtaatggaaacacctatttagaa
(amino acids)
(SEQ ID NO: 1477)
RSSQTIVHSNGNTYLE
Mouse B7 light chain variable framework 2 (FR2) sequence:
(DNA)
(SEQ ID NO: 1478)
tggtacctgcaaaaaccaggccagtctccaaagctcctgatctac
(amino acids)
(SEQ ID NO: 1479)
WYLQKPGQSPKLLIY
Mouse B7 light chain variable complementarity determining regions 2 (CDR2)
sequence:
(DNA)
(SEQ ID NO: 1480)
aaagtttccaaccgattttct
(amino acids)
(SEQ ID NO: 1481)
KVSNRFS
Mouse B7 light chain variable framework 3 (FR3) sequence:
(DNA)
(SEQ ID NO: 1482)
ggggtcccagacaggttcagtggcagtggatcagggacagatttcacactcaagatcagcagggtggaggctgagga
tctgggagtttattactgc
(amino acids)
(SEQ ID NO: 1483)
GVPDRFSGSGSGTDFTLKISRVEAEDLGVYYC
Mouse B7 light chain variable complementarity determining regions 3 (CDR3)
sequence:
(DNA)
(SEQ ID NO: 1484)
tttcaagattcacatgttcctctcacg
(amino acids)
(SEQ ID NO: 1485)
FQDSHVPLT
Mouse B7 light chain variable framework 4 (FR4) sequence:
(DNA)
(SEQ ID NO: 1486)
ttcggtgctgggaccaagctggagctgaaa
(amino acids)
(SEQ ID NO: 1487)
FGAGTKLELK
Mouse 8C7F3 heavy chain variable framework 1 (FW1) sequence:
(DNA)
(SEQ ID NO: 1488)
gaagtgatgctggtggagtctgggggaggcttagtgaagcctggagggtccctgaaactctcctgtgcagcctctgg
attcactttcagt
(amino acids)
(SEQ ID NO: 1489)
EVMLVESGGGLVKPGGSLKLSCAASGFTES
Mouse 8C7F3 heavy chain variable complementarity determining regions 1 (CDR1)
sequence:
(DNA)
(SEQ ID NO: 1490)
acctatgccatgtct
(amino acids)
(SEQ ID NO: 1491)
TYAMS
Mouse 8C7F3 heavy chain variable framework 2 (FW2) sequence:
(DNA)
(SEQ ID NO: 1492)
tgggttcgccagactccggagaagaggctggagtgggtcgca
(amino acids)
(SEQ ID NO: 1493)
WVRQTPEKRLEWVA
Mouse 8C7F3 heavy chain variable complementarity determining regions 2 (CDR2)
sequence:
(DNA)
(SEQ ID NO: 1494)
gccattagtaatggtggtggttacacctactatccagacagtctgaagggg
(amino acids)
(SEQ ID NO: 1495)
AISNGGGYTYYPDSLKG
Mouse 8C7F3 heavy chain variable framework 3 (FW3) sequence:
(DNA)
(SEQ ID NO: 1496)
cgattcaccatctccagagacaatgccaagaacaccctgtacctgcaaatgagcagtctgaggtctgaggacacggc
cacgtattactgtgcaaga
(amino acids)
(SEQ ID NO: 1497)
RFTISRDNAKNTLYLQMSSLRSEDTATYYCAR
Mouse 8C7F3 heavy chain variable complementarity determining regions 3 (CDR3)
sequence:
(DNA)
(SEQ ID NO: 1498)
cgttactatgatcactactttgactac
(amino acids)
(SEQ ID NO: 1499)
RYYDHYFDY
Mouse 8C7F3 heavy chain variable framework 4 (FW4) sequence:
(DNA)
(SEQ ID NO: 1500)
tggggccaaggcaccgctctcacggtctcctca
(amino acids)
(SEQ ID NO: 1501)
WGQGTALTVSS
Mouse 8C7F3 light chain variable framework 1 (FR1) sequence:
(DNA)
(SEQ ID NO: 1502)
atcattgtgctgacccaatctccagcttctttggctgtgtctctagggcagagggccaccatatcctgc
(amino acids)
(SEQ ID NO: 1503)
IIVLTQSPASLAVSLGQRATISC
Mouse 8C7F3 light chain variable complementarity determining regions 1 (CDR1)
sequence:
(DNA)
(SEQ ID NO: 1504)
agagccagtgagagtgttgctacttatggcaataattttatgcag
(amino acids)
(SEQ ID NO: 1505)
RASESVATYGNNFMQ
Mouse 8C7F3 light chain variable framework 2 (FR2) sequence:
(DNA)
(SEQ ID NO: 1506)
tggtatcagcagaaaccaggacagccacccaaactcctcatctat
(amino acids)
(SEQ ID NO: 1507)
WYQQKPGQPPKLLIY
Mouse 8C7F3 light chain variable complementarity determining regions 2 (CDR2)
sequence:
(DNA)
(SEQ ID NO: 1508)
cttgcatccaccctagattct
(amino acids)
(SEQ ID NO: 1509)
LASTLDS
Mouse 8C7F3 light chain variable framework 3 (FR3) sequence:
(DNA)
(SEQ ID NO: 1510)
ggggtccctgccaggttcagtggcagtgggtctaggacagacttcaccctcaccattgatcctgtggaggctgatga
tgctgcaacctattactgt
(amino acids)
(SEQ ID NO: 1511)
GVPARFSGSGSRTDFTLTIDPVEADDAATYYC
Mouse 8C7F3light chain variable complementarity determining regions 3 (CDR3)
sequence:
(DNA)
(SEQ ID NO: 1512)
cagcaaaataatgaggatcctccgacg
(amino acids)
(SEQ ID NO: 1513)
QQNNEDPPT
Mouse 8C7F3 light chain variable framework 4 (FR4) sequence:
(DNA)
(SEQ ID NO: 1514)
ttcggtggaggcaccaagctggaaatcaag
(amino acids)
(SEQ ID NO: 1515)
FGGGTKLEIK
Mouse H11 heavy chain variable framework 1 (FW1) sequence:
(DNA)
(SEQ ID NO: 1516)
gaagtggtgctggtggagtctgggggaggcttagtggagcctggagggtccctgaaactctcctgtgtagcctctgg
attcgcttttagt
(amino acids)
(SEQ ID NO: 1517)
EVVLVESGGGLVEPGGSLKLSCVASGFAFS
Mouse H11 heavy chain variable complementarity determining regions 1 (CDR1)
Sequence:
(DNA)
(SEQ ID NO: 1518)
acctttgccatgtct
(amino acids)
(SEQ ID NO: 1519)
TFAMS
Mouse H11 heavy chain variable framework 2 (FW2) sequence:
(DNA)
(SEQ ID NO: 1520)
tggattcgccagactccggagaagaggctggagtgggtcgca
(amino acids)
(SEQ ID NO: 1521)
WIRQTPEKRLEWVA
Mouse H11 heavy chain variable complementarity determining regions 2 (CDR2)
Sequence:
(DNA)
(SEQ ID NO: 1522)
gccattagtaatggtggtggttacacttactatccagacactctgaagggg
(amino acids)
(SEQ ID NO: 1523)
AISNGGGYTYYPDTLKG
Mouse H11 heavy chain variable framework 3 (FW3) sequence:
(DNA)
(SEQ ID NO: 1524)
cgattcaccatctccagagacaatgccaagaataccctgtacctgcaaatgagtagtctgaggtctgaggacacggc
cgtgtattactgtgcaaga
(amino acids)
(SEQ ID NO: 1525)
RFTISRDNAKNTLYLQMSSLRSEDTAVYYCAR
Mouse H11 heavy chain variable complementarity determining regions 3 (CDR3)
Sequence:
(DNA)
(SEQ ID NO: 1526)
cgctactatgatctctactttgactta
(amino acids)
(SEQ ID NO: 1527)
RYYDLYFDL
Mouse H11 heavy chain variable framework 4 (FW4) sequence:
(DNA)
(SEQ ID NO: 1528)
tggggccaaggcacctctctcatagtctcctca
(amino acids)
(SEQ ID NO: 1529)
WGQGTSLIVSS
Mouse H11 light chain variable framework 1 (FR1) sequence:
(DNA)
(SEQ ID NO: 1530)
gatattctgatgacccaaactccactctccctgcctgtcagtcttggagatcaagcctccatttcttgc
(amino acids)
(SEQ ID NO: 1532)
DILMTQTPLSLPVSLGDQASISC
Mouse H11 light chain variable complementarity determining regions 1 (CDR1)
Sequence:
(DNA)
(SEQ ID NO: 1532)
agatctagtcagaacattgtacatagtaatggaaacacctatttagaa
(amino acids)
(SEQ ID NO: 1533)
RSSQNIVHSNGNTYLE
Mouse H11 light chain variable framework 2 (FR2) sequence:
(DNA)
(SEQ ID NO: 1534)
tggtacctgcagaaaccaggccagtctccaaagctcctgatctac
(amino acids)
(SEQ ID NO: 1535)
WYLQKPGQSPKLLIY
Mouse H11 light chain variable complementarity determining regions 2 (CDR2)
sequence:
(DNA)
(SEQ ID NO: 1536)
aaagtttccaaccgattttct
(amino acids)
(SEQ ID NO: 1537)
KVSNRFS
Mouse H11 light chain variable framework 3 (FR3) sequence:
(DNA)
(SEQ ID NO: 1538)
ggggtccccgacaggttcagtggtagtgggtcagggacagatttcacactcaagatcagcagagtggaggctgagga
tctgggagtttattactgc
(amino acids)
(SEQ ID NO: 1539)
GVPDRFSGSGSGTDFTLKISRVEAEDLGVYYC
Mouse H11 light chain variable complementarity determining regions 3 (CDR3)
sequence:
(DNA)
(SEQ ID NO: 1540)
tttcaagattcacatgttcctctcacg
(amino acids)
(SEQ ID NO: 1541)
FQDSHVPLT
Mouse H11 light chain variable framework 4 (FR4) sequence:
(DNA)
(SEQ ID NO: 1542)
ttcggtgctgggaccaggctggagctgaaa
(amino acids)
(SEQ ID NO: 1543)
FGAGTRLELK
Mouse B9 heavy chain variable framework 1 (FW1) sequence:
(DNA)
(SEQ ID NO: 1544)
gaggtgcaggtggtggagtctgggggagacttagtgaagcctggagggtccctgaaactctcctgtgcagcctctgg
attcactttcagt
(amino acids)
(SEQ ID NO: 1545)
EVQVVESGGDLVKPGGSLKLSCAASGFTFS
Mouse B9 heavy chain variable complementarity determining regions 1 (CDR1)
sequence:
(DNA)
(SEQ ID NO: 1546)
agatatggcatgtct
(amino acids)
(SEQ ID NO: 1547)
RYGMS
Mouse B9 heavy chain variable framework 2 (FW2) sequence:
(DNA)
(SEQ ID NO: 1548)
tgggttcgccagactccagacaagaggctggagtgggtcgca
(amino acids)
(SEQ ID NO: 1549)
WVRQTPDKRLEWVA
Mouse B9 heavy chain variable complementarity determining regions 2 (CDR2)
sequence:
(DNA)
(SEQ ID NO: 1550)
accattagtagtggtggtacttacatctactatccagacagtgtgaagggg
(amino acids)
(SEQ ID NO: 1551)
TISSGGTYIYYPDSVKG
Mouse B9 heavy chain variable framework 3 (FW3) sequence:
(DNA)
(SEQ ID NO: 1552)
cgattcaccatctccagagacaatgccaagaacaccctgtacctgcaaatgagcagtctgaagtctgaggacacagc
catgtattactgtgca
(amino acids)
(SEQ ID NO: 1553)
RFTISRDNAKNTLYLQMSSLKSEDTAMYYCAR
Mouse B9 heavy chain variable complementarity determining regions 3 (CDR3)
sequence:
(DNA)
(SEQ ID NO: 1554)
agggataactacggtagtagctacgactatgctatggactac
(amino acids)
(SEQ ID NO: 1555)
DNYGSSYDYAMDY
Mouse B9 heavy chain variable framework 4 (FW4) sequence:
(DNA)
(SEQ ID NO: 1556)
tggggtcaaggaacctcagtcaccgtctcctct
(amino acids)
(SEQ ID NO: 1557)
WGQGTSVTVSS
Mouse B9 light chain variable framework 1 (FR1) sequence:
(DNA)
(SEQ ID NO: 1558)
caaattgttctcacccagtctccagcaatcatgtctgcatctccaggggaggaggtcaccctaacctgc
(amino acids)
(SEQ ID NO: 1559)
QIVLTQSPAIMSASPGEEVTLTC
Mouse B9 light chain variable complementarity determining regions 1 (CDR1)
sequence:
(DNA)
(SEQ ID NO: 1560)
agtgccagctcaagtgtaagttacatgcac
(amino acids)
(SEQ ID NO: 1561)
SASSSVSYMH
Mouse B9 light chain variable framework 2 (FR2) sequence:
(DNA)
(SEQ ID NO: 1562)
tggttccagcagaggccaggcacttctcccaaactctggatttat
(amino acids)
(SEQ ID NO: 1563)
WFQQRPGTSPKLWIY
Mouse B9 light chain variable complementarity determining regions 2 (CDR2)
sequence:
(DNA)
(SEQ ID NO: 1564)
accacatccaacctggcttct
(amino acids)
(SEQ ID NO: 1565)
TTSNLAS
Mouse B9 light chain variable framework 3 (FR3) sequence:
(DNA)
(SEQ ID NO: 1566)
ggagtccctgctcgcttcagtggcagtggatctgggacctcttactctctcacaatcagccgaatggaggctgaaga
tgctgccacttattactgc
(amino acids)
(SEQ ID NO: 1567)
GVPARFSGSGSGTSYSLTISRMEAEDAATYYC
Mouse B9 light chain variable complementarity determining regions 3 (CDR3)
sequence:
(DNA)
(SEQ ID NO: 1568)
cagcaaaggagtagttacccattc
(amino acids)
(SEQ ID NO: 1569)
QQRSSYPF
Mouse B9 light chain variable framework 4 (FR4) sequence:
(DNA)
(SEQ ID NO: 1570)
acgttcggctcggggacaaagttggaaataaaa
(amino acids)
(SEQ ID NO: 1571)
TFGSGTKLEIK
mu3C2B1 scFv- sequence
(DNA)
(SEQ ID NO: 1572)
Gaagtgatgctggtggagtctgggggaggcttagtgaagcctggagggtccctgaaactctcctgtgcagcctctgg
aatcactttcagtacctataccatgtcgtgggttcgccagactccggagaagaggctggagtgggtcgcaaccatta
gtactggtggtgataaaacctactattcagacagtgtgaagggtcgattcaccatctccagagacaatgccaagaac
aacctgtacctccaaatgagcagtctgaggtctgaggacacggccttgtattactgtgcaaggggaaccacggctat
gtattactatgctatggactactggggtcaaggaacctcagtcaccgtctcctcaggtggcggaggatctggcggag
gtggaagcggcggaggcggatccgacattgtgctgacacagtctcctgcttccttagctgtatctctggggcagagg
gccaccatctcatgcagggccagcaaaagtatcagtacatctgactataattatattcactggtaccaacagaaacc
aggacagccacccaaactcctcatctatcttgcatccaacctagaatctggggtccctgccaggttcagtggcagtg
ggtctgggacagacttcaccctcaacatccatcctgtggaggaagaagatgctgcaacctattactgtcagcacagt
agggagcttcctctcacgttcggtgctgggaccaagctggagctgaaa
(amino acids)
(SEQ ID NO: 1573)
EVMLVESGGGLVKPGGSLKLSCAASGITFSTYTMSWVRQTPEKRLEWVATISTGGDKTYYSDSVKGRFTISRDNAKN
NLYLQMSSLRSEDTALYYCARGTTAMYYYAMDYWGQGTSVTVSSGGGGSGGGGSGGGGSDIVLTQSPASLAVSLGQR
ATISCRASKSISTSDYNYIHWYQQKPGQPPKLLIYLASNLESGVPARFSGSGSGTDFTLNIHPVEEEDAATYYCQHS
RELPLTFGAGTKLELK
mu20A10 scFv- full sequence
(DNA)
(SEQ ID NO: 1574)
gaagtgatgctggtggaatctggcggcggactggttaagcctggcggatctctgaagctgagctgtgccgccagcgg
cttcacctttagcacatacgccatgagctggatccggcagacccctgagaagagactggaatgggttgccagcatcg
gcagagccggcagcacctactacagcgattctgtgaagggcagattcaccatcagccgggacaacgtgcggaacatc
ctgtacctgcagatgagcagcctgcggagcgaggataccgccatgtactactgtgccagaggacccatctacaacga
ctacgacgagttcgcctattggggccagggcacactggttacagtttctgctggtggcggaggatctggcggaggtg
gaagcggcggaggcggatccaatatcatgatgacacagagccccagcagcctggctgtgtctgctggcgagaaagtg
accatgtcctgcaagagcagccagagcgtgctgtactccagcaaccagaagaactacctggcctggtatcagcagaa
gcccggccagtctcctaagctgctgatctactgggccagcaccagagaaagcggcgtgcccgatagattcacaggca
gcggcagcggaaccgacttcaccctgacaatcagctctgtgcaggccgaagatctggccgtgtactattgccaccag
tacctgtccagcctgacctttggcgccggaacaaagctggaactgaag
(amino acids)
(SEQ ID NO: 1575)
EVMLVESGGGLVKPGGSLKLSCAASGFTFSTYAMSWIRQTPEKRLEWVASIGRAGSTYYSDSVKGRFTISRDNVRNI
LYLQMSSLRSEDTAMYYCARGPIYNDYDEFAYWGQGTLVTVSAGGGGSGGGGSGGGGSNIMMTQSPSSLAVSAGEKV
TMSCKSSQSVLYSSNQKNYLAWYQQKPGQSPKLLIYWASTRESGVPDRFTGSGSGTDFTLTISSVQAEDLAVYYCHQ
YLSSLTFGAGTKLELK
hu20A10M scEV
(DNA)
(SEQ ID NO: 1576)
gaggtgcagctggttgaatctggcggcggacttgtgaagcctggcggatctctgagactgagctgtgccgccagcgg
cttcacctttagcacatacgccatgagctgggtccgacaggcccctggaaaaggccttgaatgggttgcctctatcg
gcagagccggcagcacctactacagcgattctgtgaagggcagattcaccatcagccgggacaacgccaagaacagc
ctgtacctgcagatgaactccctgagagccgaggacaccgccgtgtactattgtgccagaggacccatctacaacga
ctacgacgagttcgcctattggggccagggcacactggtcacagtcagctctggcggtggcggaagcggaggcggtg
gctccggtggcggaggcagcgacatcgtgatgacacagagcccttctagcctggccgtgtctctgggagagagagcc
acaatcagctgcaagagcagccagagcgtgctgtactccagcaaccagaagaactacctggcctggtatcagcagaa
gcccggacagtctcccaagctgctgatctactgggccagcaccagagaaagcggcgtgcccgatagattcacaggct
ctggcagcggcaccgacttcaccctgacaattagcagtctgcaggccgaggacgtggccgtgtactactgtcaccag
tacctgagcagcctgacctttggcggcggaacaaaggtggaaatcaag
(amino acids)
(SEQ ID NO: 1577)
EVQLVESGGGLVKPGGSLRLSCAASGFTFSTYAMSWVRQAPGKGLEWVASIGRAGSTYYSDSVKGRFTISRDNAKNS
LYLQMNSLRAEDTAVYYCARGPIYNDYDEFAYWGQGTLVTVSSGGGGSGGGGSGGGGSDIVMTQSPSSLAVSLGERA
TISCKSSQSVLYSSNQKNYLAWYQQKPGQSPKLLIYWASTRESGVPDRFTGSGSGTDFTLTISSLQAEDVAVYYCHQ
YLSSLTFGGGTKVEIK
hu20A10C2 scEV
(DNA)
(SEQ ID NO: 1578)
gaggtgcagctggttgaatctggcggcggacttgtgaagcctggcggatctctgagactgagctgtgccgccagcgg
cttcacctttagcacatacgccatgagctgggtccgacaggcccctggaaaaggccttgaatgggttgcctctatcg
gcagagccggcagcacctactacagcgattctgtgaagggcagattcaccatcagccgggacaacgccaagaacagc
ctgtacctgcagatgaactccctgagagccgaggacaccgccgtgtactattgtgccagaggacccatctacaacga
ctacgacgagttcgcctattggggccagggcacactggtcacagtcagctctggcggtggcggaagcggaggcggtg
gctccggtggcggaggcagcgacattgtgctgacccagtctccagcctccttggccgtgtctccaggacagagggcc
accatcacctgcaagagcagccagagcgtgctgtactccagcaaccagaagaactacctggcctggtatcagcagaa
accaggacaacctcctaaactcctgatttactgggccagcaccagagaaagcggggtcccagccaggttcagcggca
gtgggtctgggaccgatttcaccctcacaattaatcctgtggaagctaatgatactgcaaattattactgtcaccag
tacctgagcagcctgaccttcggcggagggaccaaggtggagatcaaacga
(amino acids)
(SEQ ID NO: 1579)
EVQLVESGGGLVKPGGSLRLSCAASGFTFSTYAMSWVRQAPGKGLEWVASIGRAGSTYYSDSVKGRFTISRDNAKNS
LYLQMNSLRAEDTAVYYCARGPIYNDYDEFAYWGQGTLVTVSSGGGGSGGGGSGGGGSDIVLTQSPASLAVSPGQRA
TITCKSSQSVLYSSNQKNYLAWYQQKPGQPPKLLIYWASTRESGVPARFSGSGSGTDFTLTINPVEANDTANYYCHQ
YLSSLTFGGGTKVEIKR
hu20A10N scEV
(DNA)
(SEQ ID NO: 1580)
caggtgcagctggttgaatctggcggcggacttgtgaagcctggcggatctctgagactgagctgtgccgccagcgg
cttcacctttagcacatacgccatgagctggatcagacaggcccctggcaaaggcctggaatgggtggcgtctattg
gcagagccggcagcacctactacagcgactctgtgaagggcagattcaccatcagccgggacaacgccaagaacagc
ctgtacctgcagatgaactccctgagagccgaggacaccgccgtgtactattgtgccagaggacccatctacaacga
ctacgacgagttcgcctattggggccagggcacactggtcacagtttctagcggcggtggcggaagcggaggcggtg
gctccggtggcggaggcagcgaaattgtgctgacacagagccccgccacactgtcactttctccaggcgaaagagcc
acactgagctgcaagagcagccagagcgtgctgtactccagcaaccagaagaactacctggcctggtatcagcagaa
gcccggccaagctcctcggctgctgatctattgggccagcacaagagagagcggcatccctgccagattttctggca
gcggctctggcaccgatttcaccctgaccataagcagcctggaacctgaggacttcgccgtgtattactgccaccag
tacctgagcagcctgacctttggcggaggcaccaaggtggaaatcaagcgg
(amino acids)
(SEQ ID NO: 1581)
QVQLVESGGGLVKPGGSLRLSCAASGFTFSTYAMSWIRQAPGKGLEWVASIGRAGSTYYSDSVKGRFTISRDNAKNS
LYLQMNSLRAEDTAVYYCARGPIYNDYDEFAYWGQGTLVTVSSGGGGSGGGGSGGGGSEIVLTQSPATLSLSPGERA
TLSCKSSQSVLYSSNQKNYLAWYQQKPGQAPRLLIYWASTRESGIPARFSGSGSGTDFTLTISSLEPEDFAVYYCHQ
YLSSLTFGGGTKVEIKR
mu20A10-CAR T-8-4-1BB-3z
(DNA)
(SEQ ID NO: 1582)
atggccttaccagtgaccgccttgctcctgccgctggccttgctgctccacgccgccaggccggaagtgatgctggt
ggaatctggcggcggactggttaagcctggcggatctctgaagctgagctgtgccgccagcggcttcacctttagca
catacgccatgagctggatccggcagacccctgagaagagactggaatgggttgccagcatcggcagagccggcagc
acctactacagcgattctgtgaagggcagattcaccatcagccgggacaacgtgcggaacatcctgtacctgcagat
gagcagcctgcggagcgaggataccgccatgtactactgtgccagaggacccatctacaacgactacgacgagttcg
cctattggggccagggcacactggttacagtttctgctggtggcggaggatctggcggaggtggaagcggcggaggc
ggatccaatatcatgatgacacagagcccgagcagcctggctgtgtctgctggcgagaaagtgaccatgtcctgcaa
gagcagccagagcgtgctgtactccagcaaccagaagaactacctggcctggtatcagcagaagcccggccagtctc
ctaagctgctgatctactgggccagcaccagagaaagcggcgtgcccgatagattcacaggcagcggcagcggaacc
gacttcaccctgacaatcagctctgtgcaggccgaagatctggccgtgtactattgccaccagtacctgtccagcct
gacctttggcgccggaacaaagctggaactgaagacaacaacccctgcccccagacctcctaccccagcccctacaa
ttgccagccagcctctgagcctgaggcccgaggcttgtagacctgctgctggcggagccgtgcacaccagaggactg
gatttcgcctgcgacatctacatctgggcgcccttggccgggacttgtggggtccttctcctgtcactggttatcac
cctttactgcaaacggggcagaaagaaactcctgtatatattcaaacaaccatttatgagaccagtacaaactactc
aagaggaagatggctgtagctgccgatttccagaagaagaagaaggaggatgtgaactgagagtgaagttcagcagg
agcgcagacgcccccgcgtacaagcagggccagaaccagctctataacgagctcaatctaggacgaagagaggagta
cgatgttttggacaagagacgtggccgggaccctgagatggggggaaagccgagaaggaagaaccctcaggaaggcc
tgtacaatgaactgcagaaagataagatggcggaggcctacagtgagattgggatgaaaggcgagcgccggaggggc
aaggggcacgatggcctttaccagggtctcagtacagccaccaaggacacctacgacgcccttcacatgcaggccct
gccccctcgctgataa
(amino acis)
(SEQ ID NO: 1583)
MALPVTALLLPLALLLHAARPEVMLVESGGGLVKPGGSLKLSCAASGFTESTYAMSWIRQTPEKRLEWVASIGRAGS
TYYSDSVKGRFTISRDNVRNILYLQMSSLRSEDTAMYYCARGPIYNDYDEFAYWGQGTLVTVSAGGGGSGGGGSGGG
GSNIMMTQSPSSLAVSAGEKVTMSCKSSQSVLYSSNQKNYLAWYQQKPGQSPKLLIYWASTRESGVPDRFTGSGSGT
DFTLTISSVQAEDLAVYYCHQYLSSLTFGAGTKLELKTTTPAPRPPTPAPTIASQPLSLRPEACRPAAGGAVHTRGL
DFACDIYIWAPLAGTCGVLLLSLVITLYCKRGRKKLLYIFKQPFMRPVQTTQEEDGCSCRFPEEEEGGCELRVKFSR
SADAPAYKQGQNQLYNELNLGRREEYDVLDKRRGRDPEMGGKPRRKNPQEGLYNELQKDKMAEAYSEIGMKGERRRG
KGHDGLYQGLSTATKDTYDALHMQALPPR**
hu20A10-CAR T-8-4-1BB-3z
(DNA)
(SEQ ID NO: 1584)
atggccttaccagtgaccgccttgctcctgccgctggccttgctgctccacgccgccaggccggaggtgcagctggt
tgaatctggcggcggacttgtgaagcctggcggatctctgagactgagctgtgccgccagcggcttcacctttagca
catacgccatgagctgggtccgacaggcccctggaaaaggccttgaatgggttgcctctatcggcagagccggcagc
acctactacagcgattctgtgaagggcagattcaccatcagccgggacaacgccaagaacagcctgtacctgcagat
gaactccctgagagccgaggacaccgccgtgtactattgtgccagaggacccatctacaacgactacgacgagttcg
cctattggggccagggcacactggtcacagtcagctctggcggtggcggaagcggaggcggtggctccggtggcgga
ggcagcgacattgtgctgacccagtctccagcctccttggccgtgtctccaggacagagggccaccatcacctgcaa
gagcagccagagcgtgctgtactccagcaaccagaagaactacctggcctggtatcagcagaaaccaggacaacctc
ctaaactcctgatttactgggccagcaccagagaaagcggggtcccagccaggttcagcggcagtgggtctgggacc
gatttcaccctcacaattaatcctgtggaagctaatgatactgcaaattattactgtcaccagtacctgagcagcct
gaccttcggcggagggaccaaggtggagatcaaacgaacaacaacccctgcccccagacctcctaccccagccccta
caattgccagccagcctctgagcctgaggcccgaggcttgtagacctgctgctggcggagccgtgcacaccagagga
ctggatttcgcctgcgacatctacatctgggcgcccttggccgggacttgtggggtccttctcctgtcactggttat
caccctttactgcaaacggggcagaaagaaactcctgtatatattcaaacaaccatttatgagaccagtacaaacta
ctcaagaggaagatggctgtagctgccgatttccagaagaagaagaaggaggatgtgaactgagagtgaagttcagc
aggagcgcagacgcccccgcgtacaagcagggccagaaccagctctataacgagctcaatctaggacgaagagagga
gtacgatgttttggacaagagacgtggccgggaccctgagatggggggaaagccgagaaggaagaaccctcaggaag
gcctgtacaatgaactgcagaaagataagatggcggaggcctacagtgagattgggatgaaaggcgagcgccggagg
ggcaaggggcacgatggcctttaccagggtctcagtacagccaccaaggacacctacgacgcccttcacatgcaggc
cctgccccctcgctgataa
(amino acids)
(SEQ ID NO: 1585)
MALPVTALLLPLALLLHAARPEVQLVESGGGLVKPGGSLRLSCAASGFTESTYAMSWVRQAPGKGLEWVASIGRAGS
TYYSDSVKGRFTISRDNAKNSLYLQMNSLRAEDTAVYYCARGPIYNDYDEFAYWGQGTLVTVSSGGGGSGGGGSGGG
GSDIVLTQSPASLAVSPGQRATITCKSSQSVLYSSNQKNYLAWYQQKPGQPPKLLIYWASTRESGVPARFSGSGSGT
DFTLTINPVEANDTANYYCHQYLSSLTEGGGTKVEIKRTTTPAPRPPTPAPTIASQPLSLRPEACRPAAGGAVHTRG
LDFACDIYIWAPLAGTCGVLLLSLVITLYCKRGRKKLLYIFKQPFMRPVQTTQEEDGCSCRFPEEEEGGCELRVKFS
RSADAPAYKQGQNQLYNELNLGRREEYDVLDKRRGRDPEMGGKPRRKNPQEGLYNELQKDKMAEAYSEIGMKGERRR
GKGHDGLYQGLSTATKDTYDALHMQALPPR**
mu20A10-CAR T-8-28-3z
(DNA)
(SEQ ID NO: 1586)
atggccttaccagtgaccgccttgctcctgccgctggccttgctgctccacgccgccaggccggaagtgatgctggt
ggaatctggcggcggactggttaagcctggcggatctctgaagctgagctgtgccgccagcggcttcacctttagca
catacgccatgagctggatccggcagacccctgagaagagactggaatgggttgccagcatcggcagagccggcagc
acctactacagcgattctgtgaagggcagattcaccatcagccgggacaacgtgcggaacatcctgtacctgcagat
gagcagcctgcggagcgaggataccgccatgtactactgtgccagaggacccatctacaacgactacgacgagttcg
cctattggggccagggcacactggttacagtttctgctggtggcggaggatctggcggaggtggaagcggcggaggc
ggatccaatatcatgatgacacagagcccgagcagcctggctgtgtctgctggcgagaaagtgaccatgtcctgcaa
gagcagccagagcgtgctgtactccagcaaccagaagaactacctggcctggtatcagcagaagcccggccagtctc
ctaagctgctgatctactgggccagcaccagagaaagcggcgtgcccgatagattcacaggcagcggcagcggaacc
gacttcaccctgacaatcagctctgtgcaggccgaagatctggccgtgtactattgccaccagtacctgtccagcct
gacctttggcgccggaacaaagctggaactgaagacaacaacccctgcccccagacctcctaccccagcccctacaa
ttgccagccagcctctgagcctgaggcccgaggcttgtagacctgctgctggcggagccgtgcacaccagaggactg
gatttcgcctgcgacatctacatctgggcgcccttggccgggacttgtggggtccttctcctgtcactggttatcac
cctttactgcaggagtaagaggagcaggctcctgcacagtgactacatgaacatgactcctagaagacctgggccta
ccagaaagcattaccagccctatgccccaccacgcgacttcgcagcctatcgctccagagtgaagttcagcaggagc
gcagacgcccccgcgtacaagcagggccagaaccagctctataacgagctcaatctaggacgaagagaggagtacga
tgttttggacaagagacgtggccgggaccctgagatggggggaaagccgagaaggaagaaccctcaggaaggcctgt
acaatgaactgcagaaagataagatggcggaggcctacagtgagattgggatgaaaggcgagcgccggaggggcaag
gggcacgatggcctttaccagggtctcagtacagccaccaaggacacctacgacgcccttcacatgcaggccctgcc
ccctcgctgataa
(amino acids)
(SEQ ID NO: 1587)
MALPVTALLLPLALLLHAARPEVMLVESGGGLVKPGGSLKLSCAASGFTESTYAMSWIRQTPEKRLEWVASIGRAGS
TYYSDSVKGRFTISRDNVRNILYLQMSSLRSEDTAMYYCARGPIYNDYDEFAYWGQGTLVTVSAGGGGSGGGGSGGG
GSNIMMTQSPSSLAVSAGEKVTMSCKSSQSVLYSSNQKNYLAWYQQKPGQSPKLLIYWASTRESGVPDRFTGSGSGT
DFTLTISSVQAEDLAVYYCHQYLSSLTFGAGTKLELKTTTPAPRPPTPAPTIASQPLSLRPEACRPAAGGAVHTRGL
DFACDIYIWAPLAGTCGVLLLSLVITLYCRSKRSRLLHSDYMNMTPRRPGPTRKHYQPYAPPRDFAAYRSRVKFSRS
ADAPAYKQGQNQLYNELNLGRREEYDVLDKRRGRDPEMGGKPRRKNPQEGLYNELQKDKMAEAYSEIGMKGERRRGK
GHDGLYQGLSTATKDTYDALHMQALPPR**
hu20A10-CAR T-8-28-3z
(DNA)
(SEQ ID NO: 1588)
atggccttaccagtgaccgccttgctcctgccgctggccttgctgctccacgccgccaggccggaggtgcagctggt
tgaatctggcggcggacttgtgaagcctggcggatctctgagactgagctgtgccgccagcggcttcacctttagca
catacgccatgagctgggtccgacaggcccctggaaaaggccttgaatgggttgcctctatcggcagagccggcagc
acctactacagcgattctgtgaagggcagattcaccatcagccgggacaacgccaagaacagcctgtacctgcagat
gaactccctgagagccgaggacaccgccgtgtactattgtgccagaggacccatctacaacgactacgacgagttcg
cctattggggccagggcacactggtcacagtcagctctggcggtggcggaagcggaggcggtggctccggtggcgga
ggcagcgacattgtgctgacccagtctccagcctccttggccgtgtctccaggacagagggccaccatcacctgcaa
gagcagccagagcgtgctgtactccagcaaccagaagaactacctggcctggtatcagcagaaaccaggacaacctc
ctaaactcctgatttactgggccagcaccagagaaagcggggtcccagccaggttcagcggcagtgggtctgggacc
gatttcaccctcacaattaatcctgtggaagctaatgatactgcaaattattactgtcaccagtacctgagcagcct
gaccttcggcggagggaccaaggtggagatcaaacgaacaacaacccctgcccccagacctcctaccccagccccta
caattgccagccagcctctgagcctgaggcccgaggcttgtagacctgctgctggcggagccgtgcacaccagagga
ctggatttcgcctgcgacatctacatctgggcgcccttggccgggacttgtggggtccttctcctgtcactggttat
caccctttactgcaggagtaagaggagcaggctcctgcacagtgactacatgaacatgactcctagaagacctgggc
ctaccagaaagcattaccagccctatgccccaccacgcgacttcgcagcctatcgctccagagtgaagttcagcagg
agcgcagacgcccccgcgtacaagcagggccagaaccagctctataacgagctcaatctaggacgaagagaggagta
cgatgttttggacaagagacgtggccgggaccctgagatggggggaaagccgagaaggaagaaccctcaggaaggcc
tgtacaatgaactgcagaaagataagatggcggaggcctacagtgagattgggatgaaaggcgagcgccggaggggc
aaggggcacgatggcctttaccagggtctcagtacagccaccaaggacacctacgacgcccttcacatgcaggccct
gccccctcgctgataa
(amino acids)
(SEQ ID NO: 1589)
MALPVTALLLPLALLLHAARPEVQLVESGGGLVKPGGSLRLSCAASGFTESTYAMSWVRQAPGKGLEWVASIGRAGS
TYYSDSVKGRFTISRDNAKNSLYLQMNSLRAEDTAVYYCARGPIYNDYDEFAYWGQGTLVTVSSGGGGSGGGGSGGG
GSDIVLTQSPASLAVSPGQRATITCKSSQSVLYSSNQKNYLAWYQQKPGQPPKLLIYWASTRESGVPARFSGSGSGT
DFTLTINPVEANDTANYYCHQYLSSLTEGGGTKVEIKRTTTPAPRPPTPAPTIASQPLSLRPEACRPAAGGAVHTRG
LDFACDIYIWAPLAGTCGVLLLSLVITLYCRSKRSRLLHSDYMNMTPRRPGPTRKHYQPYAPPRDFAAYRSRVKFSR
SADAPAYKQGQNQLYNELNLGRREEYDVLDKRRGRDPEMGGKPRRKNPQEGLYNELQKDKMAEAYSEIGMKGERRRG
KGHDGLYQGLSTATKDTYDALHMQALPPR**
mu20A10-CAR T-8-4-1BB-3z-1XX
(DNA)
(SEQ ID NO: 1590)
atggccttaccagtgaccgccttgctcctgccgctggccttgctgctccacgccgccaggccggaagtgatgctggt
ggaatctggcggcggactggttaagcctggcggatctctgaagctgagctgtgccgccagcggcttcacctttagca
catacgccatgagctggatccggcagacccctgagaagagactggaatgggttgccagcatcggcagagccggcagc
acctactacagcgattctgtgaagggcagattcaccatcagccgggacaacgtgcggaacatcctgtacctgcagat
gagcagcctgcggagcgaggataccgccatgtactactgtgccagaggacccatctacaacgactacgacgagttcg
cctattggggccagggcacactggttacagtttctgctggtggcggaggatctggcggaggtggaagcggcggaggc
ggatccaatatcatgatgacacagagcccgagcagcctggctgtgtctgctggcgagaaagtgaccatgtcctgcaa
gagcagccagagcgtgctgtactccagcaaccagaagaactacctggcctggtatcagcagaagcccggccagtctc
ctaagctgctgatctactgggccagcaccagagaaagcggcgtgcccgatagattcacaggcagcggcagcggaacc
gacttcaccctgacaatcagctctgtgcaggccgaagatctggccgtgtactattgccaccagtacctgtccagcct
gacctttggcgccggaacaaagctggaactgaagacaacaacccctgcccccagacctcctaccccagcccctacaa
ttgccagccagcctctgagcctgaggcccgaggcttgtagacctgctgctggcggagccgtgcacaccagaggactg
gatttcgcctgcgacatctacatctgggcgcccttggccgggacttgtggggtccttctcctgtcactggttatcac
cctttactgcaaacggggcagaaagaaactcctgtatatattcaaacaaccatttatgagaccagtacaaactactc
aagaggaagatggctgtagctgccgatttccagaagaagaagaaggaggatgtgaactgagagtgaagttcagcagg
agcgcagacgcccccgcgtacaagcagggccagaaccagctctataacgagctcaatctaggacgaagagaggagta
cgatgttttggacaagagacgtggccgggaccctgagatggggggaaagccgagaaggaagaaccctcaggaaggcc
tgttcaatgaactgcagaaagataagatggcggaggccttcagtgagattgggatgaaaggcgagcgccggaggggc
aaggggcacgatggccttttccagggtctcagtacagccaccaaggacaccttcgacgcccttcacatgcaggccct
gccccctcgctgataa
(DNA)
(SEQ ID NO: 1591)
MALPVTALLLPLALLLHAARPEVMLVESGGGLVKPGGSLKLSCAASGFTESTYAMSWIRQTPEKRLEWVASIGRAGS
TYYSDSVKGRFTISRDNVRNILYLQMSSLRSEDTAMYYCARGPIYNDYDEFAYWGQGTLVTVSAGGGGSGGGGSGGG
GSNIMMTQSPSSLAVSAGEKVTMSCKSSQSVLYSSNQKNYLAWYQQKPGQSPKLLIYWASTRESGVPDRFTGSGSGT
DFTLTISSVQAEDLAVYYCHQYLSSLTFGAGTKLELKTTTPAPRPPTPAPTIASQPLSLRPEACRPAAGGAVHTRGL
DFACDIYIWAPLAGTCGVLLLSLVITLYCKRGRKKLLYIFKQPFMRPVQTTQEEDGCSCREPEEEEGGCELRVKFSR
SADAPAYKQGQNQLYNELNLGRREEYDVLDKRRGRDPEMGGKPRRKNPQEGLENELQKDKMAEAFSEIGMKGERRRG
KGHDGLFQGLSTATKDTFDALHMQALPPR**
hu20A10-CAR T-8-4-1BB-3z-1XX
(DNA)
(SEQ ID NO: 1592)
atggccttaccagtgaccgccttgctcctgccgctggccttgctgctccacgccgccaggccggaggtgcagctggt
tgaatctggcggcggacttgtgaagcctggcggatctctgagactgagctgtgccgccagcggcttcacctttagca
catacgccatgagctgggtccgacaggcccctggaaaaggccttgaatgggttgcctctatcggcagagccggcagc
acctactacagcgattctgtgaagggcagattcaccatcagccgggacaacgccaagaacagcctgtacctgcagat
gaactccctgagagccgaggacaccgccgtgtactattgtgccagaggacccatctacaacgactacgacgagttcg
cctattggggccagggcacactggtcacagtcagctctggcggtggcggaagcggaggcggtggctccggtggcgga
ggcagcgacattgtgctgacccagtctccagcctccttggccgtgtctccaggacagagggccaccatcacctgcaa
gagcagccagagcgtgctgtactccagcaaccagaagaactacctggcctggtatcagcagaaaccaggacaacctc
ctaaactcctgatttactgggccagcaccagagaaagcggggtcccagccaggttcagcggcagtgggtctgggacc
gatttcaccctcacaattaatcctgtggaagctaatgatactgcaaattattactgtcaccagtacctgagcagcct
gaccttcggcggagggaccaaggtggagatcaaacgaacaacaacccctgcccccagacctcctaccccagccccta
caattgccagccagcctctgagcctgaggcccgaggcttgtagacctgctgctggcggagccgtgcacaccagagga
ctggatttcgcctgcgacatctacatctgggcgcccttggccgggacttgtggggtccttctcctgtcactggttat
caccctttactgcaaacggggcagaaagaaactcctgtatatattcaaacaaccatttatgagaccagtacaaacta
ctcaagaggaagatggctgtagctgccgatttccagaagaagaagaaggaggatgtgaactgagagtgaagttcagc
aggagcgcagacgcccccgcgtacaagcagggccagaaccagctctataacgagctcaatctaggacgaagagagga
gtacgatgttttggacaagagacgtggccgggaccctgagatggggggaaagccgagaaggaagaaccctcaggaag
gcctgttcaatgaactgcagaaagataagatggcggaggccttcagtgagattgggatgaaaggcgagcgccggagg
ggcaaggggcacgatggccttttccagggtctcagtacagccaccaaggacaccttcgacgcccttcacatgcaggc
cctgccccctcgctgataa
(amino acids)
(SEQ ID NO: 1593)
MALPVTALLLPLALLLHAARPEVQLVESGGGLVKPGGSLRLSCAASGFTESTYAMSWVRQAPGKGLEWVASIGRAGS
TYYSDSVKGRFTISRDNAKNSLYLQMNSLRAEDTAVYYCARGPIYNDYDEFAYWGQGTLVTVSSGGGGSGGGGSGGG
GSDIVLTQSPASLAVSPGQRATITCKSSQSVLYSSNQKNYLAWYQQKPGQPPKLLIYWASTRESGVPARFSGSGSGT
DFTLTINPVEANDTANYYCHQYLSSLTEGGGTKVEIKRTTTPAPRPPTPAPTIASQPLSLRPEACRPAAGGAVHTRG
LDFACDIYIWAPLAGTCGVLLLSLVITLYCKRGRKKLLYIFKQPFMRPVQTTQEEDGCSCRFPEEEEGGCELRVKFS
RSADAPAYKQGQNQLYNELNLGRREEYDVLDKRRGRDPEMGGKPRRKNPQEGLFNELQKDKMAEAFSEIGMKGERRR
GKGHDGLFQGLSTATKDTFDALHMQALPPR**
mu20A10-CAR T-8-28-3z-1XX
(DNA)
(SEQ ID NO: 1594)
atggccttaccagtgaccgccttgctcctgccgctggccttgctgctccacgccgccaggccggaagtgatgctggt
ggaatctggcggcggactggttaagcctggcggatctctgaagctgagctgtgccgccagcggcttcacctttagca
catacgccatgagctggatccggcagacccctgagaagagactggaatgggttgccagcatcggcagagccggcagc
acctactacagcgattctgtgaagggcagattcaccatcagccgggacaacgtgcggaacatcctgtacctgcagat
gagcagcctgcggagcgaggataccgccatgtactactgtgccagaggacccatctacaacgactacgacgagttcg
cctattggggccagggcacactggttacagtttctgctggtggcggaggatctggcggaggtggaagcggcggaggc
ggatccaatatcatgatgacacagagcccgagcagcctggctgtgtctgctggcgagaaagtgaccatgtcctgcaa
gagcagccagagcgtgctgtactccagcaaccagaagaactacctggcctggtatcagcagaagcccggccagtctc
ctaagctgctgatctactgggccagcaccagagaaagcggcgtgcccgatagattcacaggcagcggcagcggaacc
gacttcaccctgacaatcagctctgtgcaggccgaagatctggccgtgtactattgccaccagtacctgtccagcct
gacctttggcgccggaacaaagctggaactgaagacaacaacccctgcccccagacctcctaccccagcccctacaa
ttgccagccagcctctgagcctgaggcccgaggcttgtagacctgctgctggcggagccgtgcacaccagaggactg
gatttcgcctgcgacatctacatctgggcgcccttggccgggacttgtggggtccttctcctgtcactggttatcac
cctttactgcaggagtaagaggagcaggctcctgcacagtgactacatgaacatgactcctagaagacctgggccta
ccagaaagcattaccagccctatgccccaccacgcgacttcgcagcctatcgctccagagtgaagttcagcaggagc
gcagacgcccccgcgtacaagcagggccagaaccagctctataacgagctcaatctaggacgaagagaggagtacga
tgttttggacaagagacgtggccgggaccctgagatggggggaaagccgagaaggaagaaccctcaggaaggcctgt
tcaatgaactgcagaaagataagatggcggaggccttcagtgagattgggatgaaaggcgagcgccggaggggcaag
gggcacgatggccttttccagggtctcagtacagccaccaaggacaccttcgacgcccttcacatgcaggccctgcc
ccctcgctgataa
(amino acids)
(SEQ ID NO: 1595)
MALPVTALLLPLALLLHAARPEVMLVESGGGLVKPGGSLKLSCAASGFTESTYAMSWIRQTPEKRLEWVASIGRAGS
TYYSDSVKGRFTISRDNVRNILYLQMSSLRSEDTAMYYCARGPIYNDYDEFAYWGQGTLVTVSAGGGGSGGGGSGGG
GSNIMMTQSPSSLAVSAGEKVTMSCKSSQSVLYSSNQKNYLAWYQQKPGQSPKLLIYWASTRESGVPDRFTGSGSGT
DFTLTISSVQAEDLAVYYCHQYLSSLTFGAGTKLELKTTTPAPRPPTPAPTIASQPLSLRPEACRPAAGGAVHTRGL
DFACDIYIWAPLAGTCGVLLLSLVITLYCRSKRSRLLHSDYMNMTPRRPGPTRKHYQPYAPPRDFAAYRSRVKFSRS
ADAPAYKQGQNQLYNELNLGRREEYDVLDKRRGRDPEMGGKPRRKNPQEGLENELQKDKMAEAFSEIGMKGERRRGK
GHDGLFQGLSTATKDTFDALHMQALPPR**
hu20A10-CAR T-8-28-3z-1XX
(DNA)
(SEQ ID NO: 1596)
atggccttaccagtgaccgccttgctcctgccgctggccttgctgctccacgccgccaggccggaggtgcagctggt
tgaatctggcggcggacttgtgaagcctggcggatctctgagactgagctgtgccgccagcggcttcacctttagca
catacgccatgagctgggtccgacaggcccctggaaaaggccttgaatgggttgcctctatcggcagagccggcagc
acctactacagcgattctgtgaagggcagattcaccatcagccgggacaacgccaagaacagcctgtacctgcagat
gaactccctgagagccgaggacaccgccgtgtactattgtgccagaggacccatctacaacgactacgacgagttcg
cctattggggccagggcacactggtcacagtcagctctggcggtggcggaagcggaggcggtggctccggtggcgga
ggcagcgacattgtgctgacccagtctccagcctccttggccgtgtctccaggacagagggccaccatcacctgcaa
gagcagccagagcgtgctgtactccagcaaccagaagaactacctggcctggtatcagcagaaaccaggacaacctc
ctaaactcctgatttactgggccagcaccagagaaagcggggtcccagccaggttcagcggcagtgggtctgggacc
gatttcaccctcacaattaatcctgtggaagctaatgatactgcaaattattactgtcaccagtacctgagcagcct
gaccttcggcggagggaccaaggtggagatcaaacgaacaacaacccctgcccccagacctcctaccccagccccta
caattgccagccagcctctgagcctgaggcccgaggcttgtagacctgctgctggcggagccgtgcacaccagagga
ctggatttcgcctgcgacatctacatctgggcgcccttggccgggacttgtggggtccttctcctgtcactggttat
caccctttactgcaggagtaagaggagcaggctcctgcacagtgactacatgaacatgactcctagaagacctgggc
ctaccagaaagcattaccagccctatgccccaccacgcgacttcgcagcctatcgctccagagtgaagttcagcagg
agcgcagacgcccccgcgtacaagcagggccagaaccagctctataacgagctcaatctaggacgaagagaggagta
cgatgttttggacaagagacgtggccgggaccctgagatggggggaaagccgagaaggaagaaccctcaggaaggcc
tgttcaatgaactgcagaaagataagatggcggaggccttcagtgagattgggatgaaaggcgagcgccggaggggc
aaggggcacgatggccttttccagggtctcagtacagccaccaaggacaccttcgacgcccttcacatgcaggccct
gccccctcgctgataa
(amino acids)
(SEQ ID NO: 1597)
MALPVTALLLPLALLLHAARPEVQLVESGGGLVKPGGSLRLSCAASGFTFSTYAMSWVRQAPGKGLEWVASIGRAGS
TYYSDSVKGRFTISRDNAKNSLYLQMNSLRAEDTAVYYCARGPIYNDYDEFAYWGQGTLVTVSSGGGGSGGGGSGGG
GSDIVLTQSPASLAVSPGQRATITCKSSQSVLYSSNQKNYLAWYQQKPGQPPKLLIYWASTRESGVPARFSGSGSGT
DFTLTINPVEANDTANYYCHQYLSSLTFGGGTKVEIKRTTTPAPRPPTPAPTIASQPLSLRPEACRPAAGGAVHTRG
LDFACDIYIWAPLAGTCGVLLLSLVITLYCRSKRSRLLHSDYMNMTPRRPGPTRKHYQPYAPPRDFAAYRSRVKFSR
SADAPAYKQGQNQLYNELNLGRREEYDVLDKRRGRDPEMGGKPRRKNPQEGLENELQKDKMAEAFSEIGMKGERRRG
KGHDGLFQGLSTATKDTFDALHMQALPPR**
25E6
mu25E6 scFv- full sequence
(DNA)
(SEQ ID NO: 1598)
gaggtgcagctggtggagtctgggggagacttagtgaagcctggagggtccctgaaactctcctgtgcagcctctgg
tttcactttcagtagttatggaatgtcttgggttcgccagactccagacaagaggctggagtgggtcgcaaccatta
gtaatggtggtagacacaccttctatccagacagtgtgaaggggcgattcaccatctccagagacaatgccaagaac
accctgtatctgcaaatgagcagtctgaagtctgaggacacagccatgtatttatgtgtaagacagactgggacgga
gggctggtttgcttactggggccaagggactctggtcactgtctctgcaggtggcggaggatctggcggaggtggaa
gcggcggaggcggatccgatgttgtgatgacccagactccactcactttgtcggttaccattggacaaccagcctcc
atctcttgcaagtcaagtcagagcctcttagatagtgatggaaagacatatttgaattggttgttacagaggccagg
ccagtctccaaagcgcctaatctatctggtgtctaaactggactctggagtccctgacaggttcactggcagtggat
cagggacagatttcacactgaaaatcagcagagtggaggctgaggatttgggagtttattattgctggcaaggtaca
cattttcctcagacgttcggtggaggcaccaagctggaaatcaaa
(amino acids)
(SEQ ID NO: 1599)
EVQLVESGGDLVKPGGSLKLSCAASGFTFSSYGMSWVRQTPDKRLEWVATISNGGRHTFYPDSVKGRFTISRDNAKN
TLYLQMSSLKSEDTAMYLCVRQTGTEGWFAYWGQGTLVTVSAGGGGSGGGGSGGGGSDVVMTQTPLTLSVTIGQPAS
ISCKSSQSLLDSDGKTYLNWLLQRPGQSPKRLIYLVSKLDSGVPDRFTGSGSGTDFTLKISRVEAEDLGVYYCWQGT
HFPQTFGGGTKLEIK
hu25E6 full sequence
(DNA)
(SEQ ID NO: 1600)
gaggtgcagctggtggaatctggcggaggactggtcaagcctggaggcagcctgagactgagctgcgccgccagcgg
cttcacattcagcagctacggcatgagctgggtgcggcaggcccctggcaagggcctggaatgggtcagcaccatca
gcaacggcggaagacacaccttctaccccgacagcgtgaagggcagattcaccatctcaagagataacgccaagaac
agcctgtacctgcagatgaacagcctgcgggccgaggacaccgccgtgtactactgcgccagacagaccggcacaga
gggctggttcgcctactggggccagggcaccctggtgaccgtgtccagcggcggtggcggaagcggaggcggtggct
ccggtggcggaggcagcgacatcgtgatgacccagacccctctgtctctgagcgtgacccctggccagcctgccagc
atctcttgtaaaagcagccagagcctgctggacagcgacggcaagacctacctgaactggtacctgcagaagcccgg
ccaaagccctcagctgctgatctacctggtgtccaagctggatagcggtgttcctgatagattcagcggatctggca
gcggcaccgacttcaccctgaagatcagcagagtggaagccgaggacgtgggcgtgtactactgctggcagggcaca
cacttcccccagacattcggccagggcaccaaggtggaaatcaag
(amino acids)
(SEQ ID NO: 1601)
EVQLVESGGGLVKPGGSLRLSCAASGFTFSSYGMSWVRQAPGKGLEWVSTISNGGRHTFYPDSVKGRFTISRDNAKN
SLYLQMNSLRAEDTAVYYCARQTGTEGWFAYWGQGTLVTVSSGGGGSGGGGSGGGGSDIVMTQTPLSLSVTPGQPAS
ISCKSSQSLLDSDGKTYLNWYLQKPGQSPQLLIYLVSKLDSGVPDRFSGSGSGTDFTLKISRVEAEDVGVYYCWQGT
HFPQTFGQGTKVEIK
mu25E6-CAR T-8-4-1BB-3z
(DNA)
(SEQ ID NO: 1602)
atggccttaccagtgaccgccttgctcctgccgctggccttgctgctccacgccgccaggccggaggtgcagctggt
ggagtctgggggagacttagtgaagcctggagggtccctgaaactctcctgtgcagcctctggtttcactttcagta
gttatggaatgtcttgggttcgccagactccagacaagaggctggagtgggtcgcaaccattagtaatggtggtaga
cacaccttctatccagacagtgtgaaggggcgattcaccatctccagagacaatgccaagaacaccctgtatctgca
aatgagcagtctgaagtctgaggacacagccatgtatttatgtgtaagacagactgggacggagggctggtttgctt
actggggccaagggactctggtcactgtctctgcaggtggcggaggatctggcggaggtggaagcggcggaggcgga
tccgatgttgtgatgacccagactccactcactttgtcggttaccattggacaaccagcctccatctcttgcaagtc
aagtcagagcctcttagatagtgatggaaagacatatttgaattggttgttacagaggccaggccagtctccaaagc
gcctaatctatctggtgtctaaactggactctggagtccctgacaggttcactggcagtggatcagggacagatttc
acactgaaaatcagcagagtggaggctgaggatttgggagtttattattgctggcaaggtacacattttcctcagac
gttcggtggaggcaccaagctggaaatcaaaacaacaacccctgcccccagacctcctaccccagcccctacaattg
ccagccagcctctgagcctgaggcccgaggcttgtagacctgctgctggcggagccgtgcacaccagaggactggat
ttcgcctgcgacatctacatctgggcgcccttggccgggacttgtggggtccttctcctgtcactggttatcaccct
ttactgcaaacggggcagaaagaaactcctgtatatattcaaacaaccatttatgagaccagtacaaactactcaag
aggaagatggctgtagctgccgatttccagaagaagaagaaggaggatgtgaactgagagtgaagttcagcaggagc
gcagacgcccccgcgtacaagcagggccagaaccagctctataacgagctcaatctaggacgaagagaggagtacga
tgttttggacaagagacgtggccgggaccctgagatggggggaaagccgagaaggaagaaccctcaggaaggcctgt
acaatgaactgcagaaagataagatggcggaggcctacagtgagattgggatgaaaggcgagcgccggaggggcaag
gggcacgatggcctttaccagggtctcagtacagccaccaaggacacctacgacgcccttcacatgcaggccctgcc
ccctcgctgataa
(amino acids)
(SEQ ID NO: 1603)
MALPVTALLLPLALLLHAARPEVQLVESGGDLVKPGGSLKLSCAASGFTESSYGMSWVRQTPDKRLEWVATISNGGR
HTFYPDSVKGRFTISRDNAKNTLYLQMSSLKSEDTAMYLCVRQTGTEGWFAYWGQGTLVTVSAGGGGSGGGGSGGGG
SDVVMTQTPLTLSVTIGQPASISCKSSQSLLDSDGKTYLNWLLQRPGQSPKRLIYLVSKLDSGVPDRFTGSGSGTDF
TLKISRVEAEDLGVYYCWQGTHFPQTEGGGTKLEIKTTTPAPRPPTPAPTIASQPLSLRPEACRPAAGGAVHTRGLD
FACDIYIWAPLAGTCGVLLLSLVITLYCKRGRKKLLYIFKQPFMRPVQTTQEEDGCSCRFPEEEEGGCELRVKFSRS
ADAPAYKQGQNQLYNELNLGRREEYDVLDKRRGRDPEMGGKPRRKNPQEGLYNELQKDKMAEAYSEIGMKGERRRGK
GHDGLYQGLSTATKDTYDALHMQALPPR**
hu25E6-CAR T-8-4-1BB-3z
(SEQ ID NO: 1604)
atggccttaccagtgaccgccttgctcctgccgctggccttgctgctccacgccgccaggccggaggtgcagctggt
ggaatctggcggaggactggtcaagcctggaggcagcctgagactgagctgcgccgccagcggcttcacattcagca
gctacggcatgagctgggtgcggcaggcccctggcaagggcctggaatgggtcagcaccatcagcaacggcggaaga
cacaccttctaccccgacagcgtgaagggcagattcaccatctcaagagataacgccaagaacagcctgtacctgca
gatgaacagcctgcgggccgaggacaccgccgtgtactactgcgccagacagaccggcacagagggctggttcgcct
actggggccagggcaccctggtgaccgtgtccagcggcggtggcggaagcggaggcggtggctccggtggcggaggc
agcgacatcgtgatgacccagacccctctgtctctgagcgtgacccctggccagcctgccagcatctcttgtaaaag
cagccagagcctgctggacagcgacggcaagacctacctgaactggtacctgcagaagcccggccaaagccctcagc
tgctgatctacctggtgtccaagctggatagcggtgttcctgatagattcagcggatctggcagcggcaccgacttc
accctgaagatcagcagagtggaagccgaggacgtgggcgtgtactactgctggcagggcacacacttcccccagac
attcggccagggcaccaaggtggaaatcaagacaacaacccctgcccccagacctcctaccccagcccctacaattg
ccagccagcctctgagcctgaggcccgaggcttgtagacctgctgctggcggagccgtgcacaccagaggactggat
ttcgcctgcgacatctacatctgggcgcccttggccgggacttgtggggtccttctcctgtcactggttatcaccct
ttactgcaaacggggcagaaagaaactcctgtatatattcaaacaaccatttatgagaccagtacaaactactcaag
aggaagatggctgtagctgccgatttccagaagaagaagaaggaggatgtgaactgagagtgaagttcagcaggagc
gcagacgcccccgcgtacaagcagggccagaaccagctctataacgagctcaatctaggacgaagagaggagtacga
tgttttggacaagagacgtggccgggaccctgagatggggggaaagccgagaaggaagaaccctcaggaaggcctgt
acaatgaactgcagaaagataagatggcggaggcctacagtgagattgggatgaaaggcgagcgccggaggggcaag
gggcacgatggcctttaccagggtctcagtacagccaccaaggacacctacgacgcccttcacatgcaggccctgcc
ccctcgctgataa
(amino acids)
(SEQ ID NO: 1605)
MALPVTALLLPLALLLHAARPEVQLVESGGGLVKPGGSLRLSCAASGFTESSYGMSWVRQAPGKGLEWVSTISNGGR
HTFYPDSVKGRFTISRDNAKNSLYLQMNSLRAEDTAVYYCARQTGTEGWFAYWGQGTLVTVSSGGGGSGGGGSGGGG
SDIVMTQTPLSLSVTPGQPASISCKSSQSLLDSDGKTYLNWYLQKPGQSPQLLIYLVSKLDSGVPDRFSGSGSGTDF
TLKISRVEAEDVGVYYCWQGTHFPQTFGQGTKVEIKTTTPAPRPPTPAPTIASQPLSLRPEACRPAAGGAVHTRGLD
FACDIYIWAPLAGTCGVLLLSLVITLYCKRGRKKLLYIFKQPFMRPVQTTQEEDGCSCRFPEEEEGGCELRVKFSRS
ADAPAYKQGQNQLYNELNLGRREEYDVLDKRRGRDPEMGGKPRRKNPQEGLYNELQKDKMAEAYSEIGMKGERRRGK
GHDGLYQGLSTATKDTYDALHMQALPPR**
mu25E6-CAR T-8-28-3z
(SEQ ID NO: 1606)
atggccttaccagtgaccgccttgctcctgccgctggccttgctgctccacgccgccaggccggaggtgcagctggt
ggagtctgggggagacttagtgaagcctggagggtccctgaaactctcctgtgcagcctctggtttcactttcagta
gttatggaatgtcttgggttcgccagactccagacaagaggctggagtgggtcgcaaccattagtaatggtggtaga
cacaccttctatccagacagtgtgaaggggcgattcaccatctccagagacaatgccaagaacaccctgtatctgca
aatgagcagtctgaagtctgaggacacagccatgtatttatgtgtaagacagactgggacggagggctggtttgctt
actggggccaagggactctggtcactgtctctgcaggtggcggaggatctggcggaggtggaagcggcggaggcgga
tccgatgttgtgatgacccagactccactcactttgtcggttaccattggacaaccagcctccatctcttgcaagtc
aagtcagagcctcttagatagtgatggaaagacatatttgaattggttgttacagaggccaggccagtctccaaagc
gcctaatctatctggtgtctaaactggactctggagtccctgacaggttcactggcagtggatcagggacagatttc
acactgaaaatcagcagagtggaggctgaggatttgggagtttattattgctggcaaggtacacattttcctcagac
gttcggtggaggcaccaagctggaaatcaaaacaacaacccctgcccccagacctcctaccccagcccctacaattg
ccagccagcctctgagcctgaggcccgaggcttgtagacctgctgctggcggagccgtgcacaccagaggactggat
ttcgcctgcgacatctacatctgggcgcccttggccgggacttgtggggtccttctcctgtcactggttatcaccct
ttactgcaggagtaagaggagcaggctcctgcacagtgactacatgaacatgactcctagaagacctgggcctacca
gaaagcattaccagccctatgccccaccacgcgacttcgcagcctatcgctccagagtgaagttcagcaggagcgca
gacgcccccgcgtacaagcagggccagaaccagctctataacgagctcaatctaggacgaagagaggagtacgatgt
tttggacaagagacgtggccgggaccctgagatggggggaaagccgagaaggaagaaccctcaggaaggcctgtaca
atgaactgcagaaagataagatggcggaggcctacagtgagattgggatgaaaggcgagcgccggaggggcaagggg
cacgatggcctttaccagggtctcagtacagccaccaaggacacctacgacgcccttcacatgcaggccctgccccc
tcgctgataa
(amino acids)
(SEQ ID NO: 1607)
MALPVTALLLPLALLLHAARPEVQLVESGGDLVKPGGSLKLSCAASGFTESSYGMSWVRQTPDKRLEWVATISNGGR
HTFYPDSVKGRFTISRDNAKNTLYLQMSSLKSEDTAMYLCVRQTGTEGWFAYWGQGTLVTVSAGGGGSGGGGSGGGG
SDVVMTQTPLTLSVTIGQPASISCKSSQSLLDSDGKTYLNWLLQRPGQSPKRLIYLVSKLDSGVPDRFTGSGSGTDF
TLKISRVEAEDLGVYYCWQGTHFPQTEGGGTKLEIKTTTPAPRPPTPAPTIASQPLSLRPEACRPAAGGAVHTRGLD
FACDIYIWAPLAGTCGVLLLSLVITLYCRSKRSRLLHSDYMNMTPRRPGPTRKHYQPYAPPRDFAAYRSRVKFSRSA
DAPAYKQGQNQLYNELNLGRREEYDVLDKRRGRDPEMGGKPRRKNPQEGLYNELQKDKMAEAYSEIGMKGERRRGKG
HDGLYQGLSTATKDTYDALHMQALPPR**
hu25E6-CAR T-8-28-3z
(SEQ ID NO: 1608)
atggccttaccagtgaccgccttgctcctgccgctggccttgctgctccacgccgccaggccggaggtgcagctggt
ggaatctggcggaggactggtcaagcctggaggcagcctgagactgagctgcgccgccagcggcttcacattcagca
gctacggcatgagctgggtgcggcaggcccctggcaagggcctggaatgggtcagcaccatcagcaacggcggaaga
cacaccttctaccccgacagcgtgaagggcagattcaccatctcaagagataacgccaagaacagcctgtacctgca
gatgaacagcctgcgggccgaggacaccgccgtgtactactgcgccagacagaccggcacagagggctggttcgcct
actggggccagggcaccctggtgaccgtgtccagcggcggtggcggaagcggaggcggtggctccggtggcggaggc
agcgacatcgtgatgacccagacccctctgtctctgagcgtgacccctggccagcctgccagcatctcttgtaaaag
cagccagagcctgctggacagcgacggcaagacctacctgaactggtacctgcagaagcccggccaaagccctcagc
tgctgatctacctggtgtccaagctggatagcggtgttcctgatagattcagcggatctggcagcggcaccgacttc
accctgaagatcagcagagtggaagccgaggacgtgggcgtgtactactgctggcagggcacacacttcccccagac
attcggccagggcaccaaggtggaaatcaagacaacaacccctgcccccagacctcctaccccagcccctacaattg
ccagccagcctctgagcctgaggcccgaggcttgtagacctgctgctggcggagccgtgcacaccagaggactggat
ttcgcctgcgacatctacatctgggcgcccttggccgggacttgtggggtccttctcctgtcactggttatcaccct
ttactgcaggagtaagaggagcaggctcctgcacagtgactacatgaacatgactcctagaagacctgggcctacca
gaaagcattaccagccctatgccccaccacgcgacttcgcagcctatcgctccagagtgaagttcagcaggagcgca
gacgcccccgcgtacaagcagggccagaaccagctctataacgagctcaatctaggacgaagagaggagtacgatgt
tttggacaagagacgtggccgggaccctgagatggggggaaagccgagaaggaagaaccctcaggaaggcctgtaca
atgaactgcagaaagataagatggcggaggcctacagtgagattgggatgaaaggcgagcgccggaggggcaagggg
cacgatggcctttaccagggtctcagtacagccaccaaggacacctacgacgcccttcacatgcaggccctgccccc
tcgctgataa
(amino acids)
(SEQ ID NO: 1609)
MALPVTALLLPLALLLHAARPEVQLVESGGGLVKPGGSLRLSCAASGFTESSYGMSWVRQAPGKGLEWVSTISNGGR
HTFYPDSVKGRFTISRDNAKNSLYLQMNSLRAEDTAVYYCARQTGTEGWFAYWGQGTLVTVSSGGGGSGGGGSGGGG
SDIVMTQTPLSLSVTPGQPASISCKSSQSLLDSDGKTYLNWYLQKPGQSPQLLIYLVSKLDSGVPDRFSGSGSGTDF
TLKISRVEAEDVGVYYCWQGTHFPQTFGQGTKVEIKTTTPAPRPPTPAPTIASQPLSLRPEACRPAAGGAVHTRGLD
FACDIYIWAPLAGTCGVLLLSLVITLYCRSKRSRLLHSDYMNMTPRRPGPTRKHYQPYAPPRDFAAYRSRVKFSRSA
DAPAYKQGQNQLYNELNLGRREEYDVLDKRRGRDPEMGGKPRRKNPQEGLYNELQKDKMAEAYSEIGMKGERRRGKG
HDGLYQGLSTATKDTYDALHMQALPPR**
mu25E6-CAR T-8-4-1BB-3z-1XX
(SEQ ID NO: 1610)
atggccttaccagtgaccgccttgctcctgccgctggccttgctgctccacgccgccaggccggaggtgcagctggt
ggagtctgggggagacttagtgaagcctggagggtccctgaaactctcctgtgcagcctctggtttcactttcagta
gttatggaatgtcttgggttcgccagactccagacaagaggctggagtgggtcgcaaccattagtaatggtggtaga
cacaccttctatccagacagtgtgaaggggcgattcaccatctccagagacaatgccaagaacaccctgtatctgca
aatgagcagtctgaagtctgaggacacagccatgtatttatgtgtaagacagactgggacggagggctggtttgctt
actggggccaagggactctggtcactgtctctgcaggtggcggaggatctggcggaggtggaagcggcggaggcgga
tccgatgttgtgatgacccagactccactcactttgtcggttaccattggacaaccagcctccatctcttgcaagtc
aagtcagagcctcttagatagtgatggaaagacatatttgaattggttgttacagaggccaggccagtctccaaagc
gcctaatctatctggtgtctaaactggactctggagtccctgacaggttcactggcagtggatcagggacagatttc
acactgaaaatcagcagagtggaggctgaggatttgggagtttattattgctggcaaggtacacattttcctcagac
gttcggtggaggcaccaagctggaaatcaaaacaacaacccctgcccccagacctcctaccccagcccctacaattg
ccagccagcctctgagcctgaggcccgaggcttgtagacctgctgctggcggagccgtgcacaccagaggactggat
ttcgcctgcgacatctacatctgggcgcccttggccgggacttgtggggtccttctcctgtcactggttatcaccct
ttactgcaaacggggcagaaagaaactcctgtatatattcaaacaaccatttatgagaccagtacaaactactcaag
aggaagatggctgtagctgccgatttccagaagaagaagaaggaggatgtgaactgagagtgaagttcagcaggagc
gcagacgcccccgcgtacaagcagggccagaaccagctctataacgagctcaatctaggacgaagagaggagtacga
tgttttggacaagagacgtggccgggaccctgagatggggggaaagccgagaaggaagaaccctcaggaaggcctgt
tcaatgaactgcagaaagataagatggcggaggccttcagtgagattgggatgaaaggcgagcgccggaggggcaag
gggcacgatggccttttccagggtctcagtacagccaccaaggacaccttcgacgcccttcacatgcaggccctgcc
ccctcgctgataa
(amino acids)
(SEQ ID NO: 1611)
MALPVTALLLPLALLLHAARPEVQLVESGGDLVKPGGSLKLSCAASGFTESSYGMSWVRQTPDKRLEWVATISNGGR
HTFYPDSVKGRFTISRDNAKNTLYLQMSSLKSEDTAMYLCVRQTGTEGWFAYWGQGTLVTVSAGGGGSGGGGSGGGG
SDVVMTQTPLTLSVTIGQPASISCKSSQSLLDSDGKTYLNWLLQRPGQSPKRLIYLVSKLDSGVPDRFTGSGSGTDF
TLKISRVEAEDLGVYYCWQGTHFPQTEGGGTKLEIKTTTPAPRPPTPAPTIASQPLSLRPEACRPAAGGAVHTRGLD
FACDIYIWAPLAGTCGVLLLSLVITLYCKRGRKKLLYIFKQPFMRPVQTTQEEDGCSCREPEEEEGGCELRVKFSRS
ADAPAYKQGQNQLYNELNLGRREEYDVLDKRRGRDPEMGGKPRRKNPQEGLENELQKDKMAEAFSEIGMKGERRRGK
GHDGLFQGLSTATKDTFDALHMQALPPR**
hu25E6-CAR T-8-4-1BB-3z-1XX
(SEQ ID NO: 1612)
atggccttaccagtgaccgccttgctcctgccgctggccttgctgctccacgccgccaggccggaggtgcagctggt
ggaatctggcggaggactggtcaagcctggaggcagcctgagactgagctgcgccgccagcggcttcacattcagca
gctacggcatgagctgggtgcggcaggcccctggcaagggcctggaatgggtcagcaccatcagcaacggcggaaga
cacaccttctaccccgacagcgtgaagggcagattcaccatctcaagagataacgccaagaacagcctgtacctgca
gatgaacagcctgcgggccgaggacaccgccgtgtactactgcgccagacagaccggcacagagggctggttcgcct
actggggccagggcaccctggtgaccgtgtccagcggcggtggcggaagcggaggcggtggctccggtggcggaggc
agcgacatcgtgatgacccagacccctctgtctctgagcgtgacccctggccagcctgccagcatctcttgtaaaag
cagccagagcctgctggacagcgacggcaagacctacctgaactggtacctgcagaagcccggccaaagccctcagc
tgctgatctacctggtgtccaagctggatagcggtgttcctgatagattcagcggatctggcagcggcaccgacttc
accctgaagatcagcagagtggaagccgaggacgtgggcgtgtactactgctggcagggcacacacttcccccagac
attcggccagggcaccaaggtggaaatcaagacaacaacccctgcccccagacctcctaccccagcccctacaattg
ccagccagcctctgagcctgaggcccgaggcttgtagacctgctgctggcggagccgtgcacaccagaggactggat
ttcgcctgcgacatctacatctgggcgcccttggccgggacttgtggggtccttctcctgtcactggttatcaccct
ttactgcaaacggggcagaaagaaactcctgtatatattcaaacaaccatttatgagaccagtacaaactactcaag
aggaagatggctgtagctgccgatttccagaagaagaagaaggaggatgtgaactgagagtgaagttcagcaggagc
gcagacgcccccgcgtacaagcagggccagaaccagctctataacgagctcaatctaggacgaagagaggagtacga
tgttttggacaagagacgtggccgggaccctgagatggggggaaagccgagaaggaagaaccctcaggaaggcctgt
tcaatgaactgcagaaagataagatggcggaggccttcagtgagattgggatgaaaggcgagcgccggaggggcaag
gggcacgatggccttttccagggtctcagtacagccaccaaggacaccttcgacgcccttcacatgcaggccctgcc
ccctcgctgataa
(amino acids)
(SEQ ID NO: 1613)
MALPVTALLLPLALLLHAARPEVQLVESGGGLVKPGGSLRLSCAASGFTESSYGMSWVRQAPGKGLEWVSTISNGGR
HTFYPDSVKGRFTISRDNAKNSLYLQMNSLRAEDTAVYYCARQTGTEGWFAYWGQGTLVTVSSGGGGSGGGGSGGGG
SDIVMTQTPLSLSVTPGQPASISCKSSQSLLDSDGKTYLNWYLQKPGQSPQLLIYLVSKLDSGVPDRFSGSGSGTDF
TLKISRVEAEDVGVYYCWQGTHFPQTFGQGTKVEIKTTTPAPRPPTPAPTIASQPLSLRPEACRPAAGGAVHTRGLD
FACDIYIWAPLAGTCGVLLLSLVITLYCKRGRKKLLYIFKQPFMRPVQTTQEEDGCSCRFPEEEEGGCELRVKFSRS
ADAPAYKQGQNQLYNELNLGRREEYDVLDKRRGRDPEMGGKPRRKNPQEGLENELQKDKMAEAFSEIGMKGERRRGK
GHDGLFQGLSTATKDTFDALHMQALPPR**
mu25E6-CAR T-8-28-3z-1XX
(SEQ ID NO: 1614)
atggccttaccagtgaccgccttgctcctgccgctggccttgctgctccacgccgccaggccggaggtgcagctggt
ggagtctgggggagacttagtgaagcctggagggtccctgaaactctcctgtgcagcctctggtttcactttcagta
gttatggaatgtcttgggttcgccagactccagacaagaggctggagtgggtcgcaaccattagtaatggtggtaga
cacaccttctatccagacagtgtgaaggggcgattcaccatctccagagacaatgccaagaacaccctgtatctgca
aatgagcagtctgaagtctgaggacacagccatgtatttatgtgtaagacagactgggacggagggctggtttgctt
actggggccaagggactctggtcactgtctctgcaggtggcggaggatctggcggaggtggaagcggcggaggcgga
tccgatgttgtgatgacccagactccactcactttgtcggttaccattggacaaccagcctccatctcttgcaagtc
aagtcagagcctcttagatagtgatggaaagacatatttgaattggttgttacagaggccaggccagtctccaaagc
gcctaatctatctggtgtctaaactggactctggagtccctgacaggttcactggcagtggatcagggacagatttc
acactgaaaatcagcagagtggaggctgaggatttgggagtttattattgctggcaaggtacacattttcctcagac
gttcggtggaggcaccaagctggaaatcaaaacaacaacccctgcccccagacctcctaccccagcccctacaattg
ccagccagcctctgagcctgaggcccgaggcttgtagacctgctgctggcggagccgtgcacaccagaggactggat
ttcgcctgcgacatctacatctgggcgcccttggccgggacttgtggggtccttctcctgtcactggttatcaccct
ttactgcaggagtaagaggagcaggctcctgcacagtgactacatgaacatgactcctagaagacctgggcctacca
gaaagcattaccagccctatgccccaccacgcgacttcgcagcctatcgctccagagtgaagttcagcaggagcgca
gacgcccccgcgtacaagcagggccagaaccagctctataacgagctcaatctaggacgaagagaggagtacgatgt
tttggacaagagacgtggccgggaccctgagatggggggaaagccgagaaggaagaaccctcaggaaggcctgttca
atgaactgcagaaagataagatggcggaggccttcagtgagattgggatgaaaggcgagcgccggaggggcaagggg
cacgatggccttttccagggtctcagtacagccaccaaggacaccttcgacgcccttcacatgcaggccctgccccc
tcgctgataa
(amino acids)
(SEQ ID NO: 1615)
MALPVTALLLPLALLLHAARPEVQLVESGGDLVKPGGSLKLSCAASGFTESSYGMSWVRQTPDKRLEWVATISNGGR
HTFYPDSVKGRFTISRDNAKNTLYLQMSSLKSEDTAMYLCVRQTGTEGWFAYWGQGTLVTVSAGGGGSGGGGSGGGG
SDVVMTQTPLTLSVTIGQPASISCKSSQSLLDSDGKTYLNWLLQRPGQSPKRLIYLVSKLDSGVPDRFTGSGSGTDF
TLKISRVEAEDLGVYYCWQGTHFPQTEGGGTKLEIKTTTPAPRPPTPAPTIASQPLSLRPEACRPAAGGAVHTRGLD
FACDIYIWAPLAGTCGVLLLSLVITLYCRSKRSRLLHSDYMNMTPRRPGPTRKHYQPYAPPRDFAAYRSRVKFSRSA
DAPAYKQGQNQLYNELNLGRREEYDVLDKRRGRDPEMGGKPRRKNPQEGLENELQKDKMAEAFSEIGMKGERRRGKG
HDGLFQGLSTATKDTFDALHMQALPPR**
hu25E6-CAR T-8-28-3z-1XX
(SEQ ID NO: 1616)
atggccttaccagtgaccgccttgctcctgccgctggccttgctgctccacgccgccaggccggaggtgcagctggt
ggaatctggcggaggactggtcaagcctggaggcagcctgagactgagctgcgccgccagcggcttcacattcagca
gctacggcatgagctgggtgcggcaggcccctggcaagggcctggaatgggtcagcaccatcagcaacggcggaaga
cacaccttctaccccgacagcgtgaagggcagattcaccatctcaagagataacgccaagaacagcctgtacctgca
gatgaacagcctgcgggccgaggacaccgccgtgtactactgcgccagacagaccggcacagagggctggttcgcct
actggggccagggcaccctggtgaccgtgtccagcggcggtggcggaagcggaggcggtggctccggtggcggaggc
agcgacatcgtgatgacccagacccctctgtctctgagcgtgacccctggccagcctgccagcatctcttgtaaaag
cagccagagcctgctggacagcgacggcaagacctacctgaactggtacctgcagaagcccggccaaagccctcagc
tgctgatctacctggtgtccaagctggatagcggtgttcctgatagattcagcggatctggcagcggcaccgacttc
accctgaagatcagcagagtggaagccgaggacgtgggcgtgtactactgctggcagggcacacacttcccccagac
attcggccagggcaccaaggtggaaatcaagacaacaacccctgcccccagacctcctaccccagcccctacaattg
ccagccagcctctgagcctgaggcccgaggcttgtagacctgctgctggcggagccgtgcacaccagaggactggat
ttcgcctgcgacatctacatctgggcgcccttggccgggacttgtggggtccttctcctgtcactggttatcaccct
ttactgcaggagtaagaggagcaggctcctgcacagtgactacatgaacatgactcctagaagacctgggcctacca
gaaagcattaccagccctatgccccaccacgcgacttcgcagcctatcgctccagagtgaagttcagcaggagcgca
gacgcccccgcgtacaagcagggccagaaccagctctataacgagctcaatctaggacgaagagaggagtacgatgt
tttggacaagagacgtggccgggaccctgagatggggggaaagccgagaaggaagaaccctcaggaaggcctgttca
atgaactgcagaaagataagatggcggaggccttcagtgagattgggatgaaaggcgagcgccggaggggcaagggg
cacgatggccttttccagggtctcagtacagccaccaaggacaccttcgacgcccttcacatgcaggccctgccccc
tcgctgataa
(amino acids)
(SEQ ID NO: 1617)
MALPVTALLLPLALLLHAARPEVQLVESGGGLVKPGGSLRLSCAASGFTESSYGMSWVRQAPGKGLEWVSTISNGGR
HTFYPDSVKGRFTISRDNAKNSLYLQMNSLRAEDTAVYYCARQTGTEGWFAYWGQGTLVTVSSGGGGSGGGGSGGGG
SDIVMTQTPLSLSVTPGQPASISCKSSQSLLDSDGKTYLNWYLQKPGQSPQLLIYLVSKLDSGVPDRFSGSGSGTDF
TLKISRVEAEDVGVYYCWQGTHFPQTFGQGTKVEIKTTTPAPRPPTPAPTIASQPLSLRPEACRPAAGGAVHTRGLD
FACDIYIWAPLAGTCGVLLLSLVITLYCRSKRSRLLHSDYMNMTPRRPGPTRKHYQPYAPPRDFAAYRSRVKFSRSA
DAPAYKQGQNQLYNELNLGRREEYDVLDKRRGRDPEMGGKPRRKNPQEGLENELQKDKMAEAFSEIGMKGERRRGKG
HDGLFQGLSTATKDTFDALHMQALPPR**
MNC2-1XX
muMNC2-CAR T-8-4-1BB-3z-1XX
(SEQ ID NO: 1618)
atggccttaccagtgaccgccttgctcctgccgctggccttgctgctccacgccgccaggccggaggtccagctgga
ggagtcagggggaggcttagtgaagcctggagggtccctgaaactctcctgtgcagcctctggattcactttcagtg
gctatgccatgtcttgggttcgccagactccggagaagaggctggagtgggtcgcaaccattagtagtggtggtact
tatatctactatccagacagtgtgaaggggcgattcaccatctccagagacaatgccaagaacaccctgtacctgca
aatgagcagtctgaggtctgaggacacggccatgtattactgtgcaagacttgggggggataattactacgaatact
tcgatgtctggggcgcagggaccacggtcaccgtctcctccgccaaaacgacacccccatctgtctatggcggtggc
ggatccggcggtggcggatccggcggtggcggatccgacattgtgatcacacagtctacagcttccttaggtgtatc
tctggggcagagggccaccatctcatgcagggccagcaaaagtgtcagtacatctggctatagttatatgcactggt
accaacagagaccaggacagccacccaaactcctcatctatcttgcatccaacctagaatctggggtccctgccagg
ttcagtggcagtgggtctgggacagacttcaccctcaacatccatcctgtggaggaggaggatgctgcaacctatta
ctgtcagcacagtagggagcttccgttcacgttcggaggggggaccaagctggagataaaacgggctgatgctgcac
caactgtatccacaacaacccctgcccccagacctcctaccccagcccctacaattgccagccagcctctgagcctg
aggcccgaggcttgtagacctgctgctggcggagccgtgcacaccagaggactggatttcgcctgcgacatctacat
ctgggcgcccttggccgggacttgtggggtccttctcctgtcactggttatcaccctttactgcaaacggggcagaa
agaaactcctgtatatattcaaacaaccatttatgagaccagtacaaactactcaagaggaagatggctgtagctgc
cgatttccagaagaagaagaaggaggatgtgaactgagagtgaagttcagcaggagcgcagacgcccccgcgtacaa
gcagggccagaaccagctctataacgagctcaatctaggacgaagagaggagtacgatgttttggacaagagacgtg
gccgggaccctgagatggggggaaagccgagaaggaagaaccctcaggaaggcctgttcaatgaactgcagaaagat
aagatggcggaggccttcagtgagattgggatgaaaggcgagcgccggaggggcaaggggcacgatggccttttcca
gggtctcagtacagccaccaaggacaccttcgacgcccttcacatgcaggccctgccccctcgctgataa
(amino acids)
(SEQ ID NO: 1619)
MALPVTALLLPLALLLHAARPEVQLEESGGGLVKPGGSLKLSCAASGFTFSGYAMSWVRQTPEKRLEWVATISSGGT
YIYYPDSVKGRFTISRDNAKNTLYLQMSSLRSEDTAMYYCARLGGDNYYEYFDVWGAGTTVTVSSAKTTPPSVYGGG
GSGGGGSGGGGSDIVITQSTASLGVSLGQRATISCRASKSVSTSGYSYMHWYQQRPGQPPKLLIYLASNLESGVPAR
FSGSGSGTDFTLNIHPVEEEDAATYYCQHSRELPFTFGGGTKLEIKRADAAPTVSTTTPAPRPPTPAPTIASQPLSL
RPEACRPAAGGAVHTRGLDFACDIYIWAPLAGTCGVLLLSLVITLYCKRGRKKLLYIFKQPFMRPVQTTQEEDGCSC
REPEEEEGGCELRVKFSRSADAPAYKQGQNQLYNELNLGRREEYDVLDKRRGRDPEMGGKPRRKNPQEGLENELQKD
KMAEAFSEIGMKGERRRGKGHDGLFQGLSTATKDTFDALHMQALPPR**
huMNC2-CAR T-8-4-1BB-3z-1XX
(SEQ ID NO: 1620)
atggccttaccagtgaccgccttgctcctgccgctggccttgctgctccacgccgccaggccggaggtgcagctggt
ggagtctgggggaggcctggtcaagcctggggggtccctgagactctcctgtgcagcctctggattcaccttcagtg
gctatgccatgagctgggtccgccaggctccagggaaggggctggagtgggtctcaaccattagtagtggcggaacc
tacatatactaccccgactcagtgaagggccgattcaccatctccagagacaacgccaagaactcactgtatctgca
aatgaacagcctgagagccgaggacacggccgtgtattactgtgcgagacttgggggggataattactacgaatact
tcgatgtctggggcaaagggaccacggtcaccgtctcctccggcggtggcggatccggcggtggcggatccggcggt
ggcggatccgacattgtgctgacccagtctccagcctccttggccgtgtctccaggacagagggccaccatcacctg
cagagccagtaagagtgtcagtaccagcggatactcctacatgcactggtatcagcagaaaccaggacaacctccta
aactcctgatttacctggcatccaatctggagagcggggtcccagccaggttcagcggcagtgggtctgggaccgat
ttcaccctcacaattaatcctgtggaagctaatgatactgcaaattattactgtcagcacagtagggagctgccttt
cacattcggcggagggaccaaggtggagatcaaacgaactacaacaacccctgcccccagacctcctaccccagccc
ctacaattgccagccagcctctgagcctgaggcccgaggcttgtagacctgctgctggcggagccgtgcacaccaga
ggactggatttcgcctgcgacatctacatctgggcgcccttggccgggacttgtggggtccttctcctgtcactggt
tatcaccctttactgcaaacggggcagaaagaaactcctgtatatattcaaacaaccatttatgagaccagtacaaa
ctactcaagaggaagatggctgtagctgccgatttccagaagaagaagaaggaggatgtgaactgagagtgaagttc
agcaggagcgcagacgcccccgcgtacaagcagggccagaaccagctctataacgagctcaatctaggacgaagaga
ggagtacgatgttttggacaagagacgtggccgggaccctgagatggggggaaagccgagaaggaagaaccctcagg
aaggcctgttcaatgaactgcagaaagataagatggcggaggccttcagtgagattgggatgaaaggcgagcgccgg
aggggcaaggggcacgatggccttttccagggtctcagtacagccaccaaggacaccttcgacgcccttcacatgca
ggccctgccccctcgctgataa
(amino acids)
(SEQ ID NO: 1621)
MALPVTALLLPLALLLHAARPEVQLVESGGGLVKPGGSLRLSCAASGFTFSGYAMSWVRQAPGKGLEWVSTISSGGT
YIYYPDSVKGRFTISRDNAKNSLYLQMNSLRAEDTAVYYCARLGGDNYYEYFDVWGKGTTVTVSSGGGGSGGGGSGG
GGSDIVLTQSPASLAVSPGQRATITCRASKSVSTSGYSYMHWYQQKPGQPPKLLIYLASNLESGVPARFSGSGSGTD
FTLTINPVEANDTANYYCQHSRELPFTEGGGTKVEIKRTTTTPAPRPPTPAPTIASQPLSLRPEACRPAAGGAVHTR
GLDFACDIYIWAPLAGTCGVLLLSLVITLYCKRGRKKLLYIFKQPFMRPVQTTQEEDGCSCRFPEEEEGGCELRVKF
SRSADAPAYKQGQNQLYNELNLGRREEYDVLDKRRGRDPEMGGKPRRKNPQEGLENELQKDKMAEAFSEIGMKGERR
RGKGHDGLFQGLSTATKDTFDALHMQALPPR**
muMNC2-CAR T-8-28-3z-1XX
(SEQ ID NO: 1622)
atggccttaccagtgaccgccttgctcctgccgctggccttgctgctccacgccgccaggccggaggtccagctgga
ggagtcagggggaggcttagtgaagcctggagggtccctgaaactctcctgtgcagcctctggattcactttcagtg
gctatgccatgtcttgggttcgccagactccggagaagaggctggagtgggtcgcaaccattagtagtggtggtact
tatatctactatccagacagtgtgaaggggcgattcaccatctccagagacaatgccaagaacaccctgtacctgca
aatgagcagtctgaggtctgaggacacggccatgtattactgtgcaagacttgggggggataattactacgaatact
tcgatgtctggggcgcagggaccacggtcaccgtctcctccgccaaaacgacacccccatctgtctatggcggtggc
ggatccggcggtggcggatccggcggtggcggatccgacattgtgatcacacagtctacagcttccttaggtgtatc
tctggggcagagggccaccatctcatgcagggccagcaaaagtgtcagtacatctggctatagttatatgcactggt
accaacagagaccaggacagccacccaaactcctcatctatcttgcatccaacctagaatctggggtccctgccagg
ttcagtggcagtgggtctgggacagacttcaccctcaacatccatcctgtggaggaggaggatgctgcaacctatta
ctgtcagcacagtagggagcttccgttcacgttcggaggggggaccaagctggagataaaacgggctgatgctgcac
caactgtatccacaacaacccctgcccccagacctcctaccccagcccctacaattgccagccagcctctgagcctg
aggcccgaggcttgtagacctgctgctggcggagccgtgcacaccagaggactggatttcgcctgcgacatctacat
ctgggcgcccttggccgggacttgtggggtccttctcctgtcactggttatcaccctttactgcaggagtaagagga
gcaggctcctgcacagtgactacatgaacatgactcctagaagacctgggcctaccagaaagcattaccagccctat
gccccaccacgcgacttcgcagcctatcgctccagagtgaagttcagcaggagcgcagacgcccccgcgtacaagca
gggccagaaccagctctataacgagctcaatctaggacgaagagaggagtacgatgttttggacaagagacgtggcc
gggaccctgagatggggggaaagccgagaaggaagaaccctcaggaaggcctgttcaatgaactgcagaaagataag
atggcggaggccttcagtgagattgggatgaaaggcgagcgccggaggggcaaggggcacgatggccttttccaggg
tctcagtacagccaccaaggacaccttcgacgcccttcacatgcaggccctgccccctcgctgataa
(amino acids)
(SEQ ID NO: 1623)
MALPVTALLLPLALLLHAARPEVQLEESGGGLVKPGGSLKLSCAASGFTFSGYAMSWVRQTPEKRLEWVATISSGGT
YIYYPDSVKGRFTISRDNAKNTLYLQMSSLRSEDTAMYYCARLGGDNYYEYFDVWGAGTTVTVSSAKTTPPSVYGGG
GSGGGGSGGGGSDIVITQSTASLGVSLGQRATISCRASKSVSTSGYSYMHWYQQRPGQPPKLLIYLASNLESGVPAR
FSGSGSGTDFTLNIHPVEEEDAATYYCQHSRELPFTFGGGTKLEIKRADAAPTVSTTTPAPRPPTPAPTIASQPLSL
RPEACRPAAGGAVHTRGLDFACDIYIWAPLAGTCGVLLLSLVITLYCRSKRSRLLHSDYMNMTPRRPGPTRKHYQPY
APPRDFAAYRSRVKFSRSADAPAYKQGQNQLYNELNLGRREEYDVLDKRRGRDPEMGGKPRRKNPQEGLFNELQKDK
MAEAFSEIGMKGERRRGKGHDGLFQGLSTATKDTFDALHMQALPPR**
huMNC2-CAR T-8-28-3z-1XX
(SEQ ID NO: 1624)
atggccttaccagtgaccgccttgctcctgccgctggccttgctgctccacgccgccaggccggaggtgcagctggt
ggagtctgggggaggcctggtcaagcctggggggtccctgagactctcctgtgcagcctctggattcaccttcagtg
gctatgccatgagctgggtccgccaggctccagggaaggggctggagtgggtctcaaccattagtagtggcggaacc
tacatatactaccccgactcagtgaagggccgattcaccatctccagagacaacgccaagaactcactgtatctgca
aatgaacagcctgagagccgaggacacggccgtgtattactgtgcgagacttgggggggataattactacgaatact
tcgatgtctggggcaaagggaccacggtcaccgtctcctccggcggtggcggatccggcggtggcggatccggcggt
ggcggatccgacattgtgctgacccagtctccagcctccttggccgtgtctccaggacagagggccaccatcacctg
cagagccagtaagagtgtcagtaccagcggatactcctacatgcactggtatcagcagaaaccaggacaacctccta
aactcctgatttacctggcatccaatctggagagcggggtcccagccaggttcagcggcagtgggtctgggaccgat
ttcaccctcacaattaatcctgtggaagctaatgatactgcaaattattactgtcagcacagtagggagctgccttt
cacattcggcggagggaccaaggtggagatcaaacgaactacaacaacccctgcccccagacctcctaccccagccc
ctacaattgccagccagcctctgagcctgaggcccgaggcttgtagacctgctgctggcggagccgtgcacaccaga
ggactggatttcgcctgcgacatctacatctgggcgcccttggccgggacttgtggggtccttctcctgtcactggt
tatcaccctttactgcaggagtaagaggagcaggctcctgcacagtgactacatgaacatgactcctagaagacctg
ggcctaccagaaagcattaccagccctatgccccaccacgcgacttcgcagcctatcgctccagagtgaagttcagc
aggagcgcagacgcccccgcgtacaagcagggccagaaccagctctataacgagctcaatctaggacgaagagagga
gtacgatgttttggacaagagacgtggccgggaccctgagatggggggaaagccgagaaggaagaaccctcaggaag
gcctgttcaatgaactgcagaaagataagatggcggaggccttcagtgagattgggatgaaaggcgagcgccggagg
ggcaaggggcacgatggccttttccagggtctcagtacagccaccaaggacaccttcgacgcccttcacatgcaggc
cctgccccctcgctgataa
(amino acids)
(SEQ ID NO: 1625)
MALPVTALLLPLALLLHAARPEVQLVESGGGLVKPGGSLRLSCAASGFTFSGYAMSWVRQAPGKGLEWVSTISSGGT
YIYYPDSVKGRFTISRDNAKNSLYLQMNSLRAEDTAVYYCARLGGDNYYEYFDVWGKGTTVTVSSGGGGSGGGGSGG
GGSDIVLTQSPASLAVSPGQRATITCRASKSVSTSGYSYMHWYQQKPGQPPKLLIYLASNLESGVPARFSGSGSGTD
FTLTINPVEANDTANYYCQHSRELPFTEGGGTKVEIKRTTTTPAPRPPTPAPTIASQPLSLRPEACRPAAGGAVHTR
GLDFACDIYIWAPLAGTCGVLLLSLVITLYCRSKRSRLLHSDYMNMTPRRPGPTRKHYQPYAPPRDFAAYRSRVKFS
RSADAPAYKQGQNQLYNELNLGRREEYDVLDKRRGRDPEMGGKPRRKNPQEGLENELQKDKMAEAFSEIGMKGERRR
GKGHDGLFQGLSTATKDTFDALHMQALPPR**
MNE6-1XX
muMNE6-CAR T-8-4-1BB-3z-1XX
(SEQ ID NO: 1626)
atggccttaccagtgaccgccttgctcctgccgctggccttgctgctccacgccgccaggccggaggtgaaggtggt
ggagtctgggggagacttagtgaagcctggagggtccctgaaactctcctgtgtagtctctggattcactttcagta
gatatggcatgtcttgggttcgccagactccaggcaagaggctggagtgggtcgcaaccattagtggtggcggtact
tacatctactatccagacagtgtgaaggggcgattcaccatctccagagacaatgccaagaacaccctgtacctgca
aatgagcagtctgaagtctgaggacacagccatgtatcactgtacaagggataactacggtaggaactacgactacg
gtatggactactggggtcaaggaacctcagtcaccgtctcctcaggcggtggcggatccggcggtggcggatccggc
ggtggcggatcccaaattgttctcacccagtctccagcaatcatgtctgcatctccaggggaggaggtcaccctaac
ctgcagtgccacctcaagtgtaagttacatacactggttccagcagaggccaggcacttctcccaaactctggattt
atagcacatccaacctggcttctggagtccctgttcgcttcagtggcagtggatatgggacctcttactctctcaca
atcagccgaatggaggctgaagatgctgccacttattactgccagcaaaggagtagttccccattcacgttcggctc
ggggacaaagttggaaataaaaacaacaacccctgcccccagacctcctaccccagcccctacaattgccagccagc
ctctgagcctgaggcccgaggcttgtagacctgctgctggcggagccgtgcacaccagaggactggatttcgcctgc
gacatctacatctgggcgcccttggccgggacttgtggggtccttctcctgtcactggttatcaccctttactgcaa
acggggcagaaagaaactcctgtatatattcaaacaaccatttatgagaccagtacaaactactcaagaggaagatg
gctgtagctgccgatttccagaagaagaagaaggaggatgtgaactgagagtgaagttcagcaggagcgcagacgcc
cccgcgtacaagcagggccagaaccagctctataacgagctcaatctaggacgaagagaggagtacgatgttttgga
caagagacgtggccgggaccctgagatggggggaaagccgagaaggaagaaccctcaggaaggcctgttcaatgaac
tgcagaaagataagatggcggaggccttcagtgagattgggatgaaaggcgagcgccggaggggcaaggggcacgat
ggccttttccagggtctcagtacagccaccaaggacaccttcgacgcccttcacatgcaggccctgccccctcgctg
ataa
(amino acids)
(SEQ ID NO: 1627)
MALPVTALLLPLALLLHAARPEVKVVESGGDLVKPGGSLKLSCVVSGFTESRYGMSWVRQTPGKRLEWVATISGGGT
YIYYPDSVKGRFTISRDNAKNTLYLQMSSLKSEDTAMYHCTRDNYGRNYDYGMDYWGQGTSVTVSSGGGGSGGGGSG
GGGSQIVLTQSPAIMSASPGEEVTLTCSATSSVSYIHWFQQRPGTSPKLWIYSTSNLASGVPVRFSGSGYGTSYSLT
ISRMEAEDAATYYCQQRSSSPFTEGSGTKLEIKTTTPAPRPPTPAPTIASQPLSLRPEACRPAAGGAVHTRGLDFAC
DIYIWAPLAGTCGVLLLSLVITLYCKRGRKKLLYIFKQPFMRPVQTTQEEDGCSCRFPEEEEGGCELRVKFSRSADA
PAYKQGQNQLYNELNLGRREEYDVLDKRRGRDPEMGGKPRRKNPQEGLENELQKDKMAEAFSEIGMKGERRRGKGHD
GLFQGLSTATKDTFDALHMQALPPR**
huMNE6-CAR T-8-4-1BB-3z-1XX
(SEQ ID NO: 1628)
atggccttaccagtgaccgccttgctcctgccgctggccttgctgctccacgccgccaggccggaggtgcagctggt
ggagtctgggggaggcctggtcaagcctggggggtccctgagactctcctgtgcagcctctggattcaccttcagta
ggtatggcatgagctgggtccgccaggctccagggaagaggctggagtgggtctcaaccattagtggcggaggcacc
tacatatactacccagactcagtgaagggccgattcaccatctccagagacaacgccaagaacaccctgtatctgca
aatgaacagcctgagagccgaggacacggctgtgtattactgtaccagagataactatggccgcaactatgattatg
gcatggattattggggccagggcaccctggtgaccgtgagcagcggcggtggcggatccggcggtggcggatccggc
ggtggcggatccgaaattgtgttgacacagtctccagccaccctgtctttgtctccaggggaaagagccaccctcac
ctgcagcgccaccagcagtgttagctacatccactggtaccaacagaggcctggccagagccccaggctcctcatct
atagcacctccaacctggccagcggcatcccagccaggttcagtggcagtgggtctgggagcgactacactctcacc
atcagcagcctagagcctgaagattttgcagtttattactgtcagcagcgtagcagctcccctttcacctttggcag
cggcaccaaagtggaaattaaaacaacaacccctgcccccagacctcctaccccagcccctacaattgccagccagc
ctctgagcctgaggcccgaggcttgtagacctgctgctggcggagccgtgcacaccagaggactggatttcgcctgc
gacatctacatctgggcgcccttggccgggacttgtggggtccttctcctgtcactggttatcaccctttactgcaa
acggggcagaaagaaactcctgtatatattcaaacaaccatttatgagaccagtacaaactactcaagaggaagatg
gctgtagctgccgatttccagaagaagaagaaggaggatgtgaactgagagtgaagttcagcaggagcgcagacgcc
cccgcgtacaagcagggccagaaccagctctataacgagctcaatctaggacgaagagaggagtacgatgttttgga
caagagacgtggccgggaccctgagatggggggaaagccgagaaggaagaaccctcaggaaggcctgttcaatgaac
tgcagaaagataagatggcggaggccttcagtgagattgggatgaaaggcgagcgccggaggggcaaggggcacgat
ggccttttccagggtctcagtacagccaccaaggacaccttcgacgcccttcacatgcaggccctgccccctcgctg
ataa
(amino acids)
(SEQ ID NO: 1629)
MALPVTALLLPLALLLHAARPEVQLVESGGGLVKPGGSLRLSCAASGFTESRYGMSWVRQAPGKRLEWVSTISGGGT
YIYYPDSVKGRFTISRDNAKNTLYLQMNSLRAEDTAVYYCTRDNYGRNYDYGMDYWGQGTLVTVSSGGGGSGGGGSG
GGGSEIVLTQSPATLSLSPGERATLTCSATSSVSYIHWYQQRPGQSPRLLIYSTSNLASGIPARFSGSGSGSDYTLT
ISSLEPEDFAVYYCQQRSSSPFTEGSGTKVEIKTTTPAPRPPTPAPTIASQPLSLRPEACRPAAGGAVHTRGLDFAC
DIYIWAPLAGTCGVLLLSLVITLYCKRGRKKLLYIFKQPFMRPVQTTQEEDGCSCRFPEEEEGGCELRVKFSRSADA
PAYKQGQNQLYNELNLGRREEYDVLDKRRGRDPEMGGKPRRKNPQEGLENELQKDKMAEAFSEIGMKGERRRGKGHD
GLFQGLSTATKDTFDALHMQALPPR**
muMNE6-CART-8-4-28-3z-1XX
(SEQ ID NO: 1630)
atggccttaccagtgaccgccttgctcctgccgctggccttgctgctccacgccgccaggccggaggtgaaggtggt
ggagtctgggggagacttagtgaagcctggagggtccctgaaactctcctgtgtagtctctggattcactttcagta
gatatggcatgtcttgggttcgccagactccaggcaagaggctggagtgggtcgcaaccattagtggtggcggtact
tacatctactatccagacagtgtgaaggggcgattcaccatctccagagacaatgccaagaacaccctgtacctgca
aatgagcagtctgaagtctgaggacacagccatgtatcactgtacaagggataactacggtaggaactacgactacg
gtatggactactggggtcaaggaacctcagtcaccgtctcctcaggcggtggcggatccggcggtggcggatccggc
ggtggcggatcccaaattgttctcacccagtctccagcaatcatgtctgcatctccaggggaggaggtcaccctaac
ctgcagtgccacctcaagtgtaagttacatacactggttccagcagaggccaggcacttctcccaaactctggattt
atagcacatccaacctggcttctggagtccctgttcgcttcagtggcagtggatatgggacctcttactctctcaca
atcagccgaatggaggctgaagatgctgccacttattactgccagcaaaggagtagttccccattcacgttcggctc
ggggacaaagttggaaataaaaacaacaacccctgcccccagacctcctaccccagcccctacaattgccagccagc
ctctgagcctgaggcccgaggcttgtagacctgctgctggcggagccgtgcacaccagaggactggatttcgcctgc
gacatctacatctgggcgcccttggccgggacttgtggggtccttctcctgtcactggttatcaccctttactgcag
gagtaagaggagcaggctcctgcacagtgactacatgaacatgactcctagaagacctgggcctaccagaaagcatt
accagccctatgccccaccacgcgacttcgcagcctatcgctccagagtgaagttcagcaggagcgcagacgccccc
gcgtacaagcagggccagaaccagctctataacgagctcaatctaggacgaagagaggagtacgatgttttggacaa
gagacgtggccgggaccctgagatggggggaaagccgagaaggaagaaccctcaggaaggcctgttcaatgaactgc
agaaagataagatggcggaggccttcagtgagattgggatgaaaggcgagcgccggaggggcaaggggcacgatggc
cttttccagggtctcagtacagccaccaaggacaccttcgacgcccttcacatgcaggccctgccccctcgctgata
a
(amino acids)
(SEQ ID NO: 1631)
MALPVTALLLPLALLLHAARPEVKVVESGGDLVKPGGSLKLSCVVSGFTESRYGMSWVRQTPGKRLEWVATISGGGT
YIYYPDSVKGRFTISRDNAKNTLYLQMSSLKSEDTAMYHCTRDNYGRNYDYGMDYWGQGTSVTVSSGGGGSGGGGSG
GGGSQIVLTQSPAIMSASPGEEVTLTCSATSSVSYIHWFQQRPGTSPKLWIYSTSNLASGVPVRFSGSGYGTSYSLT
ISRMEAEDAATYYCQQRSSSPFTEGSGTKLEIKTTTPAPRPPTPAPTIASQPLSLRPEACRPAAGGAVHTRGLDFAC
DIYIWAPLAGTCGVLLLSLVITLYCRSKRSRLLHSDYMNMTPRRPGPTRKHYQPYAPPRDFAAYRSRVKFSRSADAP
AYKQGQNQLYNELNLGRREEYDVLDKRRGRDPEMGGKPRRKNPQEGLENELQKDKMAEAFSEIGMKGERRRGKGHDG
LFQGLSTATKDTFDALHMQALPPR**
huMNE6-CAR T-8-4-28-3z-1XX
(SEQ ID NO: 1632)
atggccttaccagtgaccgccttgctcctgccgctggccttgctgctccacgccgccaggccggaggtgcagctggt
ggagtctgggggaggcctggtcaagcctggggggtccctgagactctcctgtgcagcctctggattcaccttcagta
ggtatggcatgagctgggtccgccaggctccagggaagaggctggagtgggtctcaaccattagtggcggaggcacc
tacatatactacccagactcagtgaagggccgattcaccatctccagagacaacgccaagaacaccctgtatctgca
aatgaacagcctgagagccgaggacacggctgtgtattactgtaccagagataactatggccgcaactatgattatg
gcatggattattggggccagggcaccctggtgaccgtgagcagcggcggtggcggatccggcggtggcggatccggc
ggtggcggatccgaaattgtgttgacacagtctccagccaccctgtctttgtctccaggggaaagagccaccctcac
ctgcagcgccaccagcagtgttagctacatccactggtaccaacagaggcctggccagagccccaggctcctcatct
atagcacctccaacctggccagcggcatcccagccaggttcagtggcagtgggtctgggagcgactacactctcacc
atcagcagcctagagcctgaagattttgcagtttattactgtcagcagcgtagcagctcccctttcacctttggcag
cggcaccaaagtggaaattaaaacaacaacccctgcccccagacctcctaccccagcccctacaattgccagccagc
ctctgagcctgaggcccgaggcttgtagacctgctgctggcggagccgtgcacaccagaggactggatttcgcctgc
gacatctacatctgggcgcccttggccgggacttgtggggtccttctcctgtcactggttatcaccctttactgcag
gagtaagaggagcaggctcctgcacagtgactacatgaacatgactcctagaagacctgggcctaccagaaagcatt
accagccctatgccccaccacgcgacttcgcagcctatcgctccagagtgaagttcagcaggagcgcagacgccccc
gcgtacaagcagggccagaaccagctctataacgagctcaatctaggacgaagagaggagtacgatgttttggacaa
gagacgtggccgggaccctgagatggggggaaagccgagaaggaagaaccctcaggaaggcctgttcaatgaactgc
agaaagataagatggcggaggccttcagtgagattgggatgaaaggcgagcgccggaggggcaaggggcacgatggc
cttttccagggtctcagtacagccaccaaggacaccttcgacgcccttcacatgcaggccctgccccctcgctgata
a
(amino acids)
(SEQ ID NO: 1633)
MALPVTALLLPLALLLHAARPEVQLVESGGGLVKPGGSLRLSCAASGFTESRYGMSWVRQAPGKRLEWVSTISGGGT
YIYYPDSVKGRFTISRDNAKNTLYLQMNSLRAEDTAVYYCTRDNYGRNYDYGMDYWGQGTLVTVSSGGGGSGGGGSG
GGGSEIVLTQSPATLSLSPGERATLTCSATSSVSYIHWYQQRPGQSPRLLIYSTSNLASGIPARFSGSGSGSDYTLT
ISSLEPEDFAVYYCQQRSSSPFTEGSGTKVEIKTTTPAPRPPTPAPTIASQPLSLRPEACRPAAGGAVHTRGLDFAC
DIYIWAPLAGTCGVLLLSLVITLYCRSKRSRLLHSDYMNMTPRRPGPTRKHYQPYAPPRDFAAYRSRVKFSRSADAP
AYKQGQNQLYNELNLGRREEYDVLDKRRGRDPEMGGKPRRKNPQEGLENELQKDKMAEAFSEIGMKGERRRGKGHDG
LFQGLSTATKDTFDALHMQALPPR**
Minimal CMV promoter (mCMV)
(DNA)
(SEQ ID NO: 1634)
taggcgtgtacggtgggaggcctatataagcagagctcgtttagtgaaccgtcagatcgcctggagacgccatccac
gctgttttgacctccatagaagacaccgggaccgatccag
Minimal IL2 promoter (mIL2P)
(SEQ ID NO: 1635)
cattttgacacccccataatatttttccagaattaacagtataaattgcatctcttgttcaagagttccctatcact
ctctttaatcactactcacagtaacctcaactcctgc
Minimal promoter, miniP
(DNA)
(SEQ ID NO: 1636)
Agagggtatataatggaagctcgacttccag
IL-18 activated
(DNA)
(SEQ ID NO: 1637)
atggccttaccagtgaccgccttgctcctgccgctggccttgctgctccacgccgccaggccgtacttcggcaagct
ggaaagcaagctgagcgtgatccggaacctgaacgaccaggtgctgttcatcgatcagggcaacagacccctgttcg
aggacatgaccgacagcgactgcagagacaacgcccctcggaccatcttcatcatcagcatgtacaaggacagccag
cctagaggcatggccgtgaccatctctgtgaagtgcgagaagatcagcaccctgagctgcgagaacaagatcatcag
cttcaaagagatgaacccgccggacaacatcaaggacaccaagagcgacatcatattcttccagcggagcgtgcccg
gccacgacaacaagatgcagtttgagagcagcagctacgagggctacttcctggcctgcgagaaagagcgggacctg
ttcaagctgatcctgaagaaagaggacgaactgggcgaccgcagcatcatgttcaccgtgcagaacgaggactgata
a
(amino acids)
(SEQ ID NO: 1638)
MALPVTALLLPLALLLHAARPYFGKLESKLSVIRMLNDQVLFIDQGNRPLFEDMTDSDCR
DNAPRTIFIISMYKDSQPRGMAVTISVKCEKISTLSCENKIISFKEMNPPDNIKDTKSDI
IFFQRSVPGHDNKMQFESSSYEGYFLACEKERDLFKLILKKEDELGDRSIMFTVQNED**
Foxp3-NFATc1-X3-IL-18
(DNA)
(SEQ ID NO: 1639)
ggcttcattttttccatttactgcagaggcttcattttttccatttactgcagaggcttcattttttccatttactg
cagaactagttaggcgtgtacggtgggaggcctatataagcagagctcgtttagtgaaccgtcagatcgcctggaga
cgccatccacgctgttttgacctccatagaagacaccgggaccgatccagcctcgagagacccaatgctagccacca
tggccttaccagtgaccgccttgctcctgccgctggccttgctgctccacgccgccaggccgtacttcggcaagctg
gaaagcaagctgagcgtgatccggaacctgaacgaccaggtgctgttcatcgatcagggcaacagacccctgttcga
ggacatgaccgacagcgactgcagagacaacgcccctcggaccatcttcatcatcagcatgtacaaggacagccagc
ctagaggcatggccgtgaccatctctgtgaagtgcgagaagatcagcaccctgagctgcgagaacaagatcatcagc
ttcaaagagatgaacccgccggacaacatcaaggacaccaagagcgacatcatattcttccagcggagcgtgcccgg
ccacgacaacaagatgcagtttgagagcagcagctacgagggctacttcctggcctgcgagaaagagcgggacctgt
tcaagctgatcctgaagaaagaggacgaactgggcgaccgcagcatcatgttcaccgtgcagaacgaggactgataa
Foxp3-NFATcl-X6-IL-18
(DNA)
(SEQ ID NO: 1640)
gcttcattttttccatttactgcagaggcttcattttttccatttactgcagaggcttcattttttccatttactgc
agaggcttcattttttccatttactgcagaggcttcattttttccatttactgcagaggcttcattttttccattta
ctgcagaactagttaggcgtgtacggtgggaggcctatataagcagagctcgtttagtgaaccgtcagatcgcctgg
agacgccatccacgctgttttgacctccatagaagacaccgggaccgatccagcctcgagagacccaatgctagcca
ccatggccttaccagtgaccgccttgctcctgccgctggccttgctgctccacgccgccaggccgtacttcggcaag
ctggaaagcaagctgagcgtgatccggaacctgaacgaccaggtgctgttcatcgatcagggcaacagacccctgtt
cgaggacatgaccgacagcgactgcagagacaacgcccctcggaccatcttcatcatcagcatgtacaaggacagcc
agcctagaggcatggccgtgaccatctctgtgaagtgcgagaagatcagcaccctgagctgcgagaacaagatcatc
agcttcaaagagatgaacccgccggacaacatcaaggacaccaagagcgacatcatattcttccagcggagcgtgcc
cggccacgacaacaagatgcagtttgagagcagcagctacgagggctacttcctggcctgcgagaaagagcgggacc
tgttcaagctgatcctgaagaaagaggacgaactgggcgaccgcagcatcatgttcaccgtgcagaacgaggactga
taa
IL-2-NFATcl-X3-IL-18
(DNA)
(SEQ ID NO: 1641)
ggaggaaaaactgtttcatacagaaggcgtggaggaaaaactgtttcatacagaaggcgtggaggaaaaactgtttc
atacagaaggcgtactagttaggcgtgtacggtgggaggcctatataagcagagctcgtttagtgaaccgtcagatc
gcctggagacgccatccacgctgttttgacctccatagaagacaccgggaccgatccagcctcgagagacccaatgc
tagccaccatggccttaccagtgaccgccttgctcctgccgctggccttgctgctccacgccgccaggccgtacttc
ggcaagctggaaagcaagctgagcgtgatccggaacctgaacgaccaggtgctgttcatcgatcagggcaacagacc
cctgttcgaggacatgaccgacagcgactgcagagacaacgcccctcggaccatcttcatcatcagcatgtacaagg
acagccagcctagaggcatggccgtgaccatctctgtgaagtgcgagaagatcagcaccctgagctgcgagaacaag
atcatcagcttcaaagagatgaacccgccggacaacatcaaggacaccaagagcgacatcatattcttccagcggag
cgtgcccggccacgacaacaagatgcagtttgagagcagcagctacgagggctacttcctggcctgcgagaaagagc
gggacctgttcaagctgatcctgaagaaagaggacgaactgggcgaccgcagcatcatgttcaccgtgcagaacgag
gactgataa
IL-2-NFATcl-X6-IL-18
(DNA)
(SEQ ID NO: 1642)
ggaggaaaaactgtttcatacagaaggcgtggaggaaaaactgtttcatacagaaggcgtggaggaaaaactgtttc
atacagaaggcgtggaggaaaaactgtttcatacagaaggcgtggaggaaaaactgtttcatacagaaggcgtggag
gaaaaactgtttcatacagaaggcgtactagttaggcgtgtacggtgggaggcctatataagcagagctcgtttagt
gaaccgtcagatcgcctggagacgccatccacgctgttttgacctccatagaagacaccgggaccgatccagctcga
gagacccaatgctagccaccatggccttaccagtgaccgccttgctcctgccgctggccttgctgctccacgccgcc
aggccgtacttcggcaagctggaaagcaagctgagcgtgatccggaacctgaacgaccaggtgctgttcatcgatca
gggcaacagacccctgttcgaggacatgaccgacagcgactgcagagacaacgcccctcggaccatcttcatcatca
gcatgtacaaggacagccagcctagaggcatggccgtgaccatctctgtgaagtgcgagaagatcagcaccctgagc
tgcgagaacaagatcatcagcttcaaagagatgaacccgccggacaacatcaaggacaccaagagcgacatcatatt
cttccagcggagcgtgcccggccacgacaacaagatgcagtttgagagcagcagctacgagggctacttcctggcct
gcgagaaagagcgggacctgttcaagctgatcctgaagaaagaggacgaactgggcgaccgcagcatcatgttcacc
gtgcagaacgaggactgataa
Best antibodies with inducible IL-18 +/− 1XX mutations in ITAMs of CD3-zeta
MNC2
muMNC2-8-4-1BB-3z-Foxp3-NFAT-IL-18
(DNA)
(SEQ ID NO: 1643)
atggccttaccagtgaccgccttgctcctgccgctggccttgctgctccacgccgccaggccggaggtccagctgga
ggagtcagggggaggcttagtgaagcctggagggtccctgaaactctcctgtgcagcctctggattcactttcagtg
gctatgccatgtcttgggttcgccagactccggagaagaggctggagtgggtcgcaaccattagtagtggtggtact
tatatctactatccagacagtgtgaaggggcgattcaccatctccagagacaatgccaagaacaccctgtacctgca
aatgagcagtctgaggtctgaggacacggccatgtattactgtgcaagacttgggggggataattactacgaatact
tcgatgtctggggcgcagggaccacggtcaccgtctcctccgccaaaacgacacccccatctgtctatggcggtggc
ggatccggcggtggcggatccggcggtggcggatccgacattgtgatcacacagtctacagcttccttaggtgtatc
tctggggcagagggccaccatctcatgcagggccagcaaaagtgtcagtacatctggctatagttatatgcactggt
accaacagagaccaggacagccacccaaactcctcatctatcttgcatccaacctagaatctggggtccctgccagg
ttcagtggcagtgggtctgggacagacttcaccctcaacatccatcctgtggaggaggaggatgctgcaacctatta
ctgtcagcacagtagggagcttccgttcacgttcggaggggggaccaagctggagataaaacgggctgatgctgcac
caactgtatccacaacaacccctgcccccagacctcctaccccagcccctacaattgccagccagcctctgagcctg
aggcccgaggcttgtagacctgctgctggcggagccgtgcacaccagaggactggatttcgcctgcgacatctacat
ctgggcgcccttggccgggacttgtggggtccttctcctgtcactggttatcaccctttactgcaaacggggcagaa
agaaactcctgtatatattcaaacaaccatttatgagaccagtacaaactactcaagaggaagatggctgtagctgc
cgatttccagaagaagaagaaggaggatgtgaactgagagtgaagttcagcaggagcgcagacgcccccgcgtacaa
gcagggccagaaccagctctataacgagctcaatctaggacgaagagaggagtacgatgttttggacaagagacgtg
gccgggaccctgagatggggggaaagccgagaaggaagaaccctcaggaaggcctgtacaatgaactgcagaaagat
aagatggcggaggcctacagtgagattgggatgaaaggcgagcgccggaggggcaaggggcacgatggcctttacca
gggtctcagtacagccaccaaggacacctacgacgcccttcacatgcaggccctgccccctcgctgataagtttaaa
ctgccagaacatttctctggcctaactggccggtaccggcttcattttttccatttactgcagaggcttcatttttt
ccatttactgcagaggcttcattttttccatttactgcagaactagttaggcgtgtacggtgggaggcctatataag
cagagctcgtttagtgaaccgtcagatcgcctggagacgccatccacgctgttttgacctccatagaagacaccggg
accgatccagcctcgagagacccaatgctagccaccatggccttaccagtgaccgccttgctcctgccgctggcctt
gctgctccacgccgccaggccgtacttcggcaagctggaaagcaagctgagcgtgatccggaacctgaacgaccagg
tgctgttcatcgatcagggcaacagacccctgttcgaggacatgaccgacagcgactgcagagacaacgcccctcgg
accatcttcatcatcagcatgtacaaggacagccagcctagaggcatggccgtgaccatctctgtgaagtgcgagaa
gatcagcaccctgagctgcgagaacaagatcatcagcttcaaagagatgaacccgccggacaacatcaaggacacca
agagcgacatcatattcttccagcggagcgtgcccggccacgacaacaagatgcagtttgagagcagcagctacgag
ggctacttcctggcctgcgagaaagagcgggacctgttcaagctgatcctgaagaaagaggacgaactgggcgaccg
cagcatcatgttcaccgtgcagaacgaggactgataa
huMNC2-8-4-1BB-3z-Foxp3-NFAT-IL-18
(DNA)
(SEQ ID NO: 1644)
atggccttaccagtgaccgccttgctcctgccgctggccttgctgctccacgccgccaggccggaggtgcagctggt
ggagtctgggggaggcctggtcaagcctggggggtccctgagactctcctgtgcagcctctggattcaccttcagtg
gctatgccatgagctgggtccgccaggctccagggaaggggctggagtgggtctcaaccattagtagtggcggaacc
tacatatactaccccgactcagtgaagggccgattcaccatctccagagacaacgccaagaactcactgtatctgca
aatgaacagcctgagagccgaggacacggccgtgtattactgtgcgagacttgggggggataattactacgaatact
tcgatgtctggggcaaagggaccacggtcaccgtctcctccggcggtggcggatccggcggtggcggatccggcggt
ggcggatccgacattgtgctgacccagtctccagcctccttggccgtgtctccaggacagagggccaccatcacctg
cagagccagtaagagtgtcagtaccagcggatactcctacatgcactggtatcagcagaaaccaggacaacctccta
aactcctgatttacctggcatccaatctggagagcggggtcccagccaggttcagcggcagtgggtctgggaccgat
ttcaccctcacaattaatcctgtggaagctaatgatactgcaaattattactgtcagcacagtagggagctgccttt
cacattcggcggagggaccaaggtggagatcaaacgaactacaacaacccctgcccccagacctcctaccccagccc
ctacaattgccagccagcctctgagcctgaggcccgaggcttgtagacctgctgctggcggagccgtgcacaccaga
ggactggatttcgcctgcgacatctacatctgggcgcccttggccgggacttgtggggtccttctcctgtcactggt
tatcaccctttactgoaaacggggcagaaagaaactcctgtatatattcaaacaaccatttatgagaccagtacaaa
ctactcaagaggaagatggctgtagotgccgatttccagaagaagaagaaggaggatgtgaactgagagtgaagttc
agcaggagcgcagacgcccccgcgtacaagcagggccagaaccagotctataacgagctcaatctaggacgaagaga
ggagtacgatgttttggacaagagacgtggcogggaccctgagatggggggaaagccgagaaggaagaaccctcagg
aaggcctgtacaatgaactgcagaaagataagatggoggaggcctacagtgagattgggatgaaaggcgagcgccgg
aggggcaaggggcacgatggcctttaccagggtctcagtacagccaccaaggacacctacgacgcccttcacatgca
ggccctgocccctcgctgataagtttaaactgccagaacatttctctggcctaactggccggtaccggcttcatttt
ttccatttactgcagaggcttcattttttccatttactgcagaggcttcattttttccatttactgcagaactagtt
aggcgtgtacggtgggaggcctatataagcagagotcgtttagtgaaccgtcagatcgcctggagacgccatccacg
ctgttttgacctccatagaagacaccgggaccgatccagcctcgagagacccaatgctagccaccatggccttacca
gtgaccgocttgctcctgccgctggccttgctgctccacgccgccaggccgtacttcggcaagctggaaagcaagct
gagcgtgatcoggaacctgaacgaccaggtgctgttcatcgatcagggcaacagacccctgttcgaggacatgaccg
acagogactgcagagacaacgcccctcggaccatcttcatcatcagcatgtacaaggacagccagcctagaggcatg
gccgtgaccatctctgtgaagtgcgagaagatcagcaccctgagctgcgagaacaagatcatcagcttcaaagagat
gaaccogocggacaacatcaaggacaccaagagcgacatcatattcttccagcggagcgtgcccggccacgacaaca
agatgcagtttgagagcagcagotacgagggctacttcctggcctgcgagaaagagcgggacctgttcaagctgatc
ctgaagaaagaggacgaactgggcgaccgcagcatcatgttcaccgtgcagaacgaggactgataa
muMNC2-8-28-3z-Foxp3-NFAT-IL-18
(DNA)
(SEQ ID NO: 1645)
atggccttaccagtgaccgccttgctcctgccgctggccttgctgctccacgccgccaggccggaggtccagctgga
ggagtcagggggaggcttagtgaagcctggagggtccctgaaactctcctgtgcagcctctggattcactttcagtg
gctatgccatgtcttgggttcgccagactccggagaagaggctggagtgggtcgcaaccattagtagtggtggtact
tatatctactatccagacagtgtgaaggggcgattcaccatctccagagacaatgccaagaacaccctgtacctgca
aatgagcagtctgaggtctgaggacacggccatgtattactgtgcaagacttgggggggataattactacgaatact
tcgatgtctggggcgcagggaccacggtcaccgtctcctccgccaaaacgacacccccatctgtctatggcggtggc
ggatccggcggtggcggatccggcggtggcggatccgacattgtgatcacacagtctacagcttccttaggtgtatc
tctggggcagagggccaccatctcatgcagggccagcaaaagtgtcagtacatctggctatagttatatgcactggt
accaacagagaccaggacagccacccaaactcctcatctatcttgcatccaacctagaatctggggtccctgccagg
ttcagtggcagtgggtctgggacagacttcaccctcaacatccatcctgtggaggaggaggatgctgcaacctatta
ctgtcagcacagtagggagcttccgttcacgttcggaggggggaccaagctggagataaaacgggctgatgctgcac
caactgtatccacaacaacccctgcccccagacctcctaccccagcccctacaattgccagccagcctctgagcctg
aggcccgaggcttgtagacctgctgctggcggagccgtgcacaccagaggactggatttcgcctgcgacatctacat
ctgggcgcccttggccgggacttgtggggtccttctcctgtcactggttatcaccctttactgcaggagtaagagga
gcaggctcctgcacagtgactacatgaacatgactcctagaagacctgggcctaccagaaagcattaccagccctat
gccccaccacgcgacttcgcagcctatcgctccagagtgaagttcagcaggagcgcagacgcccccgcgtacaagca
gggccagaaccagctctataacgagctcaatctaggacgaagagaggagtacgatgttttggacaagagacgtggcc
gggaccctgagatggggggaaagccgagaaggaagaaccctcaggaaggcctgtacaatgaactgcagaaagataag
atggcggaggcctacagtgagattgggatgaaaggcgagcgccggaggggcaaggggcacgatggcctttaccaggg
tctcagtacagccaccaaggacacctacgacgcccttcacatgcaggccctgccccctcgctgataagtttaaactg
ccagaacatttctctggcctaactggccggtaccggcttcattttttccatttactgcagaggcttcattttttcca
tttactgcagaggcttcattttttccatttactgcagaactagttaggcgtgtacggtgggaggcctatataagcag
agctcgtttagtgaaccgtcagatcgcctggagacgccatccacgctgttttgacctccatagaagacaccgggacc
gatccagcctcgagagacccaatgctagccaccatggccttaccagtgaccgccttgctcctgccgctggccttgct
gctccacgccgccaggccgtacttcggcaagctggaaagcaagctgagcgtgatccggaacctgaacgaccaggtgc
tgttcatcgatcagggcaacagacccctgttcgaggacatgaccgacagcgactgcagagacaacgcccctcggacc
atcttcatcatcagcatgtacaaggacagccagcctagaggcatggccgtgaccatctctgtgaagtgcgagaagat
cagcaccctgagctgcgagaacaagatcatcagcttcaaagagatgaacccgccggacaacatcaaggacaccaaga
gcgacatcatattcttccagcggagcgtgcccggccacgacaacaagatgcagtttgagagcagcagctacgagggc
tacttcctggcctgcgagaaagagcgggacctgttcaagctgatcctgaagaaagaggacgaactgggcgaccgcag
catcatgttcaccgtgcagaacgaggactgataa
huMNC2-8-28-3z-Foxp3-NFAT-IL-18
(DNA)
(SEQ ID NO: 1646)
atggccttaccagtgaccgccttgctcctgccgctggccttgctgctccacgccgccaggccggaggtgcagctggt
ggagtctgggggaggcctggtcaagcctggggggtccctgagactctcctgtgcagcctctggattcaccttcagtg
gctatgccatgagctgggtccgccaggctccagggaaggggctggagtgggtctcaaccattagtagtggcggaacc
tacatatactaccccgactcagtgaagggccgattcaccatctccagagacaacgccaagaactcactgtatctgca
aatgaacagcctgagagccgaggacacggccgtgtattactgtgcgagacttgggggggataattactacgaatact
tcgatgtctggggcaaagggaccacggtcaccgtctcctccggcggtggcggatccggcggtggcggatccggcggt
ggcggatccgacattgtgctgacccagtctccagcctccttggccgtgtctccaggacagagggccaccatcacctg
cagagccagtaagagtgtcagtaccagcggatactcctacatgcactggtatcagcagaaaccaggacaacctccta
aactcctgatttacctggcatccaatctggagagcggggtcccagccaggttcagcggcagtgggtctgggaccgat
ttcaccctcacaattaatcctgtggaagctaatgatactgcaaattattactgtcagcacagtagggagctgccttt
cacattcggcggagggaccaaggtggagatcaaacgaactacaacaacccctgcccccagacctcctaccccagccc
ctacaattgccagccagcctctgagcctgaggcccgaggcttgtagacctgctgctggcggagccgtgcacaccaga
ggactggatttcgcctgcgacatctacatctgggcgcccttggccgggacttgtggggtccttctcctgtcactggt
tatcaccctttactgcaggagtaagaggagcaggctcctgcacagtgactacatgaacatgactcctagaagacctg
ggcctaccagaaagcattaccagccctatgccccaccacgcgacttcgcagcctatcgctccagagtgaagttcagc
aggagcgcagacgcccccgcgtacaagcagggccagaaccagctctataacgagctcaatctaggacgaagagagga
gtacgatgttttggacaagagacgtggccgggaccctgagatggggggaaagccgagaaggaagaaccctcaggaag
gcctgtacaatgaactgcagaaagataagatggcggaggcctacagtgagattgggatgaaaggcgagcgccggagg
ggcaaggggcacgatggcctttaccagggtctcagtacagccaccaaggacacctacgacgcccttcacatgcaggc
cctgccccctcgctgataagtttaaactgccagaacatttctctggcctaactggccggtaccggcttcattttttc
catttactgcagaggcttcattttttccatttactgcagaggcttcattttttccatttactgcagaactagttagg
cgtgtacggtgggaggcctatataagcagagctcgtttagtgaaccgtcagatcgcctggagacgccatccacgctg
ttttgacctccatagaagacaccgggaccgatccagcctcgagagacccaatgctagccaccatggccttaccagtg
accgccttgctcctgccgctggccttgctgctccacgccgccaggccgtacttcggcaagctggaaagcaagctgag
cgtgatccggaacctgaacgaccaggtgctgttcatcgatcagggcaacagacccctgttcgaggacatgaccgaca
gcgactgcagagacaacgcccctcggaccatcttcatcatcagcatgtacaaggacagccagcctagaggcatggcc
gtgaccatctctgtgaagtgcgagaagatcagcaccctgagctgcgagaacaagatcatcagcttcaaagagatgaa
cccgccggacaacatcaaggacaccaagagcgacatcatattcttccagcggagcgtgcccggccacgacaacaaga
tgcagtttgagagcagcagctacgagggctacttcctggcctgcgagaaagagcgggacctgttcaagctgatcctg
aagaaagaggacgaactgggcgaccgcagcatcatgttcaccgtgcagaacgaggactgataa
muMNC2-8-4-1BB-3z1XX-Foxp3-NFAT-IL-18
(DNA)
(SEQ ID NO: 1647)
atggccttaccagtgaccgccttgctcctgccgctggccttgctgctccacgccgccaggccggaggtccagctgga
ggagtcagggggaggcttagtgaagcctggagggtccctgaaactctcctgtgcagcctctggattcactttcagtg
gctatgccatgtcttgggttcgccagactccggagaagaggctggagtgggtcgcaaccattagtagtggtggtact
tatatctactatccagacagtgtgaaggggcgattcaccatctccagagacaatgccaagaacaccctgtacctgca
aatgagcagtctgaggtctgaggacacggccatgtattactgtgcaagacttgggggggataattactacgaatact
tcgatgtctggggcgcagggaccacggtcaccgtctcctccgccaaaacgacacccccatctgtctatggcggtggc
ggatccggcggtggcggatccggcggtggcggatccgacattgtgatcacacagtctacagcttccttaggtgtatc
tctggggcagagggccaccatctcatgcagggccagcaaaagtgtcagtacatctggctatagttatatgcactggt
accaacagagaccaggacagccacccaaactcctcatctatcttgcatccaacctagaatctggggtccctgccagg
ttcagtggcagtgggtctgggacagacttcaccctcaacatccatcctgtggaggaggaggatgctgcaacctatta
ctgtcagcacagtagggagcttccgttcacgttcggaggggggaccaagctggagataaaacgggctgatgctgcac
caactgtatccacaacaacccctgcccccagacctcctaccccagcccctacaattgccagccagcctctgagcctg
aggcccgaggcttgtagacctgctgctggcggagccgtgcacaccagaggactggatttcgcctgcgacatctacat
ctgggcgcccttggccgggacttgtggggtccttctcctgtcactggttatcaccctttactgcaaacggggcagaa
agaaactcctgtatatattcaaacaaccatttatgagaccagtacaaactactcaagaggaagatggctgtagctgc
cgatttccagaagaagaagaaggaggatgtgaactgagagtgaagttcagcaggagcgcagacgcccccgcgtacaa
gcagggccagaaccagctctataacgagctcaatctaggacgaagagaggagtacgatgttttggacaagagacgtg
gccgggaccctgagatggggggaaagccgagaaggaagaaccctcaggaaggcctgttcaatgaactgcagaaagat
aagatggcggaggccttcagtgagattgggatgaaaggcgagcgccggaggggcaaggggcacgatggccttttcca
gggtctcagtacagccaccaaggacaccttcgacgcccttcacatgcaggccctgccccctcgctgataagtttaaa
ctgccagaacatttctctggcctaactggccggtaccggcttcattttttccatttactgcagaggcttcatttttt
ccatttactgcagaggcttcattttttccatttactgcagaactagttaggcgtgtacggtgggaggcctatataag
cagagctcgtttagtgaaccgtcagatcgcctggagacgccatccacgctgttttgacctccatagaagacaccggg
accgatccagcctcgagagacccaatgctagccaccatggccttaccagtgaccgccttgctcctgccgctggcctt
gctgctccacgccgccaggccgtacttcggcaagctggaaagcaagctgagcgtgatccggaacctgaacgaccagg
tgotgttcatcgatcagggcaacagacccctgttcgaggacatgaccgacagcgactgcagagacaacgcccctcgg
accatcttcatcatcagcatgtacaaggacagccagcctagaggcatggccgtgaccatctctgtgaagtgcgagaa
gatcagoaccctgagctgcgagaacaagatcatcagcttcaaagagatgaacccgccggacaacatcaaggacacca
agagogacatcatattcttccagcggagcgtgcccggccacgacaacaagatgcagtttgagagcagcagctacgag
ggctacttcctggcctgcgagaaagagcgggacctgttcaagctgatcctgaagaaagaggacgaactgggcgaccg
cagcatcatgttcaccgtgcagaacgaggactgataa
huMNC2-8-4-1BB-3z1XX-Foxp3-NFAT-IL-18
(DNA)
(SEQ ID NO: 1648)
atggccttaccagtgaccgccttgctcctgccgctggccttgctgctccacgccgccaggccggaggtgcagctggt
ggagtctgggggaggcctggtcaagcctggggggtccctgagactctcctgtgcagcctctggattcaccttcagtg
gctatgccatgagctgggtccgccaggctccagggaaggggctggagtgggtctcaaccattagtagtggcggaacc
tacatatactaccccgactcagtgaagggccgattcaccatctccagagacaacgccaagaactcactgtatctgca
aatgaacagcctgagagccgaggacacggccgtgtattactgtgcgagacttgggggggataattactacgaatact
tcgatgtctggggcaaagggaccacggtcaccgtctcctccggcggtggcggatccggcggtggcggatccggcggt
ggcggatccgacattgtgctgacccagtctccagcctccttggccgtgtctccaggacagagggccaccatcacctg
cagagccagtaagagtgtcagtaccagcggatactcctacatgcactggtatcagcagaaaccaggacaacctccta
aactcctgatttacctggcatccaatctggagagcggggtcccagccaggttcagcggcagtgggtctgggaccgat
ttcaccctcacaattaatcctgtggaagctaatgatactgcaaattattactgtcagcacagtagggagctgccttt
cacattcggcggagggaccaaggtggagatcaaacgaactacaacaacccctgcccccagacctcctaccccagccc
ctacaattgccagccagcctctgagcctgaggcccgaggcttgtagacctgctgctggcggagccgtgcacaccaga
ggactggatttcgcctgcgacatctacatctgggcgcccttggccgggacttgtggggtccttctcctgtcactggt
tatcaccctttactgcaaacggggcagaaagaaactcctgtatatattcaaacaaccatttatgagaccagtacaaa
ctactcaagaggaagatggctgtagctgccgatttccagaagaagaagaaggaggatgtgaactgagagtgaagttc
agcaggagcgcagacgcccccgcgtacaagcagggccagaaccagctctataacgagctcaatctaggacgaagaga
ggagtacgatgttttggacaagagacgtggccgggaccctgagatggggggaaagccgagaaggaagaaccctcagg
aaggcctgttcaatgaactgcagaaagataagatggcggaggccttcagtgagattgggatgaaaggcgagcgccgg
aggggcaaggggcacgatggccttttccagggtctcagtacagccaccaaggacaccttcgacgcccttcacatgca
ggccctgccccctcgctgataagtttaaactgccagaacatttctctggcctaactggccggtaccggcttcatttt
ttccatttactgcagaggcttcattttttccatttactgcagaggcttcattttttccatttactgcagaactagtt
aggcgtgtacggtgggaggcctatataagcagagctcgtttagtgaaccgtcagatcgcctggagacgccatccacg
ctgttttgacctccatagaagacaccgggaccgatccagcctcgagagacccaatgctagccaccatggccttacca
gtgaccgccttgctcctgccgctggccttgctgctccacgccgccaggccgtacttcggcaagctggaaagcaagct
gagcgtgatccggaacctgaacgaccaggtgctgttcatcgatcagggcaacagacccctgttcgaggacatgaccg
acagcgactgcagagacaacgcccctcggaccatcttcatcatcagcatgtacaaggacagccagcctagaggcatg
gccgtgaccatctctgtgaagtgcgagaagatcagcaccctgagctgcgagaacaagatcatcagcttcaaagagat
gaacccgccggacaacatcaaggacaccaagagcgacatcatattcttccagcggagcgtgcccggccacgacaaca
agatgcagtttgagagcagcagctacgagggctacttcctggcctgcgagaaagagcgggacctgttcaagctgatc
ctgaagaaagaggacgaactgggcgaccgcagcatcatgttcaccgtgcagaacgaggactgataa
muMNC2-8-28-3z1XX-Foxp3-NFAT-IL-18
(DNA)
(SEQ ID NO: 1649)
atggccttaccagtgaccgccttgctcctgccgctggccttgctgctccacgccgccaggccggaggtccagctgga
ggagtcagggggaggcttagtgaagcctggagggtccctgaaactctcctgtgcagcctctggattcactttcagtg
gctatgccatgtcttgggttcgccagactccggagaagaggctggagtgggtcgcaaccattagtagtggtggtact
tatatctactatccagacagtgtgaaggggcgattcaccatctccagagacaatgccaagaacaccctgtacctgca
aatgagcagtctgaggtctgaggacacggccatgtattactgtgcaagacttgggggggataattactacgaatact
tcgatgtctggggcgcagggaccacggtcaccgtctcctccgccaaaacgacacccccatctgtctatggcggtggc
ggatccggcggtggcggatccggcggtggcggatccgacattgtgatcacacagtctacagcttccttaggtgtatc
tctggggcagagggccaccatctcatgcagggccagcaaaagtgtcagtacatctggctatagttatatgcactggt
accaacagagaccaggacagccacccaaactcctcatctatcttgcatccaacctagaatctggggtccctgccagg
ttcagtggcagtgggtctgggacagacttcaccctcaacatccatcctgtggaggaggaggatgctgcaacctatta
ctgtcagcacagtagggagcttccgttcacgttcggaggggggaccaagctggagataaaacgggctgatgctgcac
caactgtatccacaacaacccctgcccccagacctcctaccccagcccctacaattgccagccagcctctgagcctg
aggcccgaggcttgtagacctgctgctggcggagccgtgcacaccagaggactggatttcgcctgcgacatctacat
ctgggcgcccttggccgggacttgtggggtccttctcctgtcactggttatcaccctttactgcaggagtaagagga
gcaggctcctgcacagtgactacatgaacatgactcctagaagacctgggcctaccagaaagcattaccagccctat
gocccaccacgcgacttcgcagcctatcgctccagagtgaagttcagcaggagcgcagacgcccccgcgtacaagca
gggccagaaccagotctataacgagctcaatctaggacgaagagaggagtacgatgttttggacaagagacgtggcc
gggaccctgagatggggggaaagccgagaaggaagaaccctcaggaaggcctgttcaatgaactgcagaaagataag
atggoggaggccttcagtgagattgggatgaaaggcgagcgccggaggggcaaggggcacgatggccttttccaggg
tctcagtacagccaccaaggacaccttcgacgcccttcacatgcaggccctgccccctcgctgataagtttaaactg
ccagaacatttctctggcctaactggccggtaccggcttcattttttccatttactgcagaggcttcattttttcca
tttactgcagaggottcattttttccatttactgcagaactagttaggcgtgtacggtgggaggcctatataagcag
agotcgtttagtgaaccgtcagatcgcctggagacgccatccacgctgttttgacctccatagaagacaccgggacc
gatccagoctcgagagacccaatgctagccaccatggccttaccagtgaccgocttgotoctgccgotggccttgct
gotccacgccgccaggccgtacttcggcaagctggaaagcaagctgagcgtgatccggaacctgaacgaccaggtgc
tgttcatcgatcagggcaacagacccctgttogaggacatgaccgacagogactgcagagacaacgcccctcggacc
atcttcatcatcagcatgtacaaggacagccagcctagaggcatggccgtgaccatctctgtgaagtgcgagaagat
cagoaccctgagctgcgagaacaagatcatcagcttcaaagagatgaacccgccggacaacatcaaggacaccaaga
gogacatcatattcttccagcggagcgtgcccggccacgacaacaagatgcagtttgagagcagcagctacgagggc
tacttcctggcctgcgagaaagagcgggacctgttcaagctgatcctgaagaaagaggacgaactgggcgaccgcag
catcatgttcaccgtgcagaacgaggactgataa
huMNC2-8-28-3z1XX-Foxp3-NFAT-IL-18
(DNA)
(SEQ ID NO: 1650)
atggccttaccagtgaccgccttgctcctgccgctggccttgctgctccacgccgccaggccggaggtgcagctggt
ggagtctgggggaggcctggtcaagcctggggggtccctgagactctcctgtgcagcctctggattcaccttcagtg
gctatgccatgagctgggtccgccaggctccagggaaggggctggagtgggtctcaaccattagtagtggcggaacc
tacatatactaccccgactcagtgaagggccgattcaccatctccagagacaacgccaagaactcactgtatctgca
aatgaacagcctgagagccgaggacacggccgtgtattactgtgcgagacttgggggggataattactacgaatact
tcgatgtctggggcaaagggaccacggtcaccgtctcctccggcggtggcggatccggcggtggcggatccggcggt
ggcggatccgacattgtgctgacccagtctccagcctccttggccgtgtctccaggacagagggccaccatcacctg
cagagccagtaagagtgtcagtaccagcggatactcctacatgcactggtatcagcagaaaccaggacaacctccta
aactcctgatttacctggcatccaatctggagagcggggtcccagccaggttcagcggcagtgggtctgggaccgat
ttcaccctcacaattaatcctgtggaagctaatgatactgcaaattattactgtcagcacagtagggagctgccttt
cacattcggcggagggaccaaggtggagatcaaacgaactacaacaacccctgcccccagacctcctaccccagccc
ctacaattgccagccagcctctgagcctgaggcccgaggcttgtagacctgctgctggcggagccgtgcacaccaga
ggactggatttcgcctgcgacatctacatctgggcgcccttggccgggacttgtggggtccttctcctgtcactggt
tatcaccctttactgcaggagtaagaggagcaggctcctgcacagtgactacatgaacatgactcctagaagacctg
ggcctaccagaaagcattaccagccctatgccccaccacgcgacttcgcagcctatcgctccagagtgaagttcagc
aggagcgcagacgcccccgcgtacaagcagggccagaaccagctctataacgagctcaatctaggacgaagagagga
gtacgatgttttggacaagagacgtggccgggaccctgagatggggggaaagccgagaaggaagaaccctcaggaag
gcctgttcaatgaactgcagaaagataagatggcggaggccttcagtgagattgggatgaaaggcgagcgccggagg
ggcaaggggcacgatggccttttccagggtctcagtacagccaccaaggacaccttcgacgcccttcacatgcaggc
cctgccccctcgctgataagtttaaactgccagaacatttctctggcctaactggccggtaccggcttcattttttc
catttactgcagaggcttcattttttccatttactgcagaggcttcattttttccatttactgcagaactagttagg
cgtgtacggtgggaggcctatataagcagagctcgtttagtgaaccgtcagatcgcctggagacgccatccacgctg
ttttgacctccatagaagacaccgggaccgatccagcctcgagagacccaatgctagccaccatggccttaccagtg
accgccttgctcctgccgctggccttgctgctccacgccgccaggccgtacttcggcaagctggaaagcaagctgag
cgtgatccggaacctgaacgaccaggtgctgttcatcgatcagggcaacagacccctgttcgaggacatgaccgaca
gcgactgcagagacaacgcccctcggaccatcttcatcatcagcatgtacaaggacagccagcctagaggcatggcc
gtgaccatctctgtgaagtgcgagaagatcagcaccctgagctgcgagaacaagatcatcagcttcaaagagatgaa
cccgccggacaacatcaaggacaccaagagcgacatcatattcttccagcggagcgtgcccggccacgacaacaaga
tgcagtttgagagcagcagctacgagggctacttcctggcctgcgagaaagagcgggacctgttcaagctgatcctg
aagaaagaggacgaactgggcgaccgcagcatcatgttcaccgtgcagaacgaggactgataa
MNE6
muMNE6-8-4-11313-3z-Foxp3-NFAT-IL-18
(DNA)
(SEQ ID NO: 1651)
atggccttaccagtgaccgccttgctcctgccgctggccttgctgctccacgccgccaggccggaggtgaaggtggt
ggagtctgggggagacttagtgaagcctggagggtccctgaaactctcctgtgtagtctctggattcactttcagta
gatatggcatgtcttgggttcgccagactccaggcaagaggctggagtgggtcgcaaccattagtggtggcggtact
tacatctactatccagacagtgtgaaggggcgattcaccatctccagagacaatgccaagaacaccctgtacctgca
aatgagcagtctgaagtctgaggacacagccatgtatcactgtacaagggataactacggtaggaactacgactacg
gtatggactactggggtcaaggaacctcagtcaccgtctcctcaggcggtggcggatccggcggtggcggatccggc
ggtggcggatcccaaattgttctcacccagtctccagcaatcatgtctgcatctccaggggaggaggtcaccctaac
ctgcagtgccacctcaagtgtaagttacatacactggttccagcagaggccaggcacttctcccaaactctggattt
atagcacatccaacctggcttctggagtccctgttcgcttcagtggcagtggatatgggacctcttactctctcaca
atcagccgaatggaggctgaagatgctgccacttattactgccagcaaaggagtagttccccattcacgttcggctc
ggggacaaagttggaaataaaaacaacaacccctgcccccagacctcctaccccagcccctacaattgccagccagc
ctctgagcctgaggcccgaggcttgtagacctgctgctggcggagccgtgcacaccagaggactggatttcgcctgc
gacatctacatctgggcgcccttggccgggacttgtggggtccttctcctgtcactggttatcaccctttactgcaa
acggggcagaaagaaactcctgtatatattcaaacaaccatttatgagaccagtacaaactactcaagaggaagatg
gctgtagctgccgatttccagaagaagaagaaggaggatgtgaactgagagtgaagttcagcaggagcgcagacgcc
cccgcgtacaagcagggccagaaccagctctataacgagctcaatctaggacgaagagaggagtacgatgttttgga
caagagacgtggccgggaccctgagatggggggaaagccgagaaggaagaaccctcaggaaggcctgtacaatgaac
tgcagaaagataagatggcggaggcctacagtgagattgggatgaaaggcgagcgccggaggggcaaggggcacgat
ggcctttaccagggtctcagtacagccaccaaggacacctacgacgcccttcacatgcaggccctgccccctcgctg
ataagtttaaactgccagaacatttctctggcctaactggccggtaccggcttcattttttccatttactgcagagg
cttcattttttccatttactgcagaggcttcattttttccatttactgcagaactagttaggcgtgtacggtgggag
gcctatataagcagagctcgtttagtgaaccgtcagatcgcctggagacgccatccacgctgttttgacctccatag
aagacaccgggaccgatccagcctcgagagacccaatgctagccaccatggccttaccagtgaccgccttgctcctg
ccgctggccttgctgctccacgccgccaggccgtacttcggcaagctggaaagcaagctgagcgtgatccggaacct
gaacgaccaggtgctgttcatcgatcagggcaacagacccctgttcgaggacatgaccgacagcgactgcagagaca
acgcccctcggaccatcttcatcatcagcatgtacaaggacagccagcctagaggcatggccgtgaccatctctgtg
aagtgcgagaagatcagcaccctgagctgcgagaacaagatcatcagcttcaaagagatgaacccgccggacaacat
caaggacaccaagagcgacatcatattcttccagcggagcgtgcccggccacgacaacaagatgcagtttgagagca
gcagctacgagggctacttcctggcctgcgagaaagagcgggacctgttcaagctgatcctgaagaaagaggacgaa
ctgggcgaccgcagcatcatgttcaccgtgcagaacgaggactgataa
huMNE6-8-4-1BB-3z-Foxp3-NFAT-IL-18
(DNA)
(SEQ ID NO: 1652)
atggccttaccagtgaccgccttgctcctgccgctggccttgctgctccacgccgccaggccggaggtgcagctggt
ggagtctgggggaggcctggtcaagcctggggggtccctgagactctcctgtgcagcctctggattcaccttcagta
ggtatggcatgagctgggtccgccaggctccagggaagaggctggagtgggtctcaaccattagtggcggaggcacc
tacatatactacccagactcagtgaagggccgattcaccatctccagagacaacgccaagaacaccctgtatctgca
aatgaacagcctgagagccgaggacacggctgtgtattactgtaccagagataactatggccgcaactatgattatg
gcatggattattggggccagggcaccctggtgaccgtgagcagcggcggtggcggatccggcggtggcggatccggc
ggtggcggatccgaaattgtgttgacacagtctccagccaccctgtctttgtctccaggggaaagagccaccctcac
ctgcagcgccaccagcagtgttagctacatccactggtaccaacagaggcctggccagagccccaggctcctcatct
atagcacctccaacctggccagcggcatcccagccaggttcagtggcagtgggtctgggagcgactacactctcacc
atcagcagcctagagcctgaagattttgcagtttattactgtcagcagcgtagcagctcccctttcacctttggcag
cggcaccaaagtggaaattaaaacaacaacccctgcccccagacctcctaccccagcccctacaattgccagccagc
ctctgagcctgaggcccgaggcttgtagacctgctgctggcggagccgtgcacaccagaggactggatttcgcctgc
gacatctacatctgggcgcccttggccgggacttgtggggtccttctcctgtcactggttatcaccctttactgcaa
acggggcagaaagaaactcctgtatatattcaaacaaccatttatgagaccagtacaaactactcaagaggaagatg
gctgtagctgccgatttccagaagaagaagaaggaggatgtgaactgagagtgaagttcagcaggagcgcagacgcc
cccgcgtacaagcagggccagaaccagctctataacgagctcaatctaggacgaagagaggagtacgatgttttgga
caagagacgtggccgggaccctgagatggggggaaagccgagaaggaagaaccctcaggaaggcctgtacaatgaac
tgcagaaagataagatggcggaggcctacagtgagattgggatgaaaggcgagcgccggaggggcaaggggcacgat
ggcctttaccagggtctcagtacagccaccaaggacacctacgacgcccttcacatgcaggccctgccccctcgctg
ataagtttaaactgccagaacatttctctggcctaactggccggtaccggcttcattttttccatttactgcagagg
cttcattttttccatttactgcagaggcttcattttttccatttactgcagaactagttaggcgtgtacggtgggag
gcctatataagcagagctcgtttagtgaaccgtcagatcgcctggagacgccatccacgctgttttgacctccatag
aagacaccgggaccgatccagcctcgagagacccaatgctagccaccatggccttaccagtgaccgccttgctcctg
ccgctggccttgctgctccacgccgccaggccgtacttcggcaagctggaaagcaagctgagcgtgatccggaacct
gaacgaccaggtgctgttcatcgatcagggcaacagacccctgttcgaggacatgaccgacagcgactgcagagaca
acgcccctcggaccatcttcatcatcagcatgtacaaggacagccagcctagaggcatggccgtgaccatctctgtg
aagtgogagaagatcagcaccctgagctgcgagaacaagatcatcagcttcaaagagatgaacccgccggacaacat
caaggacaccaagagogacatcatattcttccagcggagcgtgcccggccacgacaacaagatgcagtttgagagca
gcagotacgagggctacttcctggcctgcgagaaagagcgggacctgttcaagctgatcctgaagaaagaggacgaa
ctgggcgaccgcagcatcatgttcaccgtgcagaacgaggactgataa
muMNE6-8-4-28-3z-Foxp3-NFAT-IL-18
(DNA)
(SEQ ID NO: 1653)
atggccttaccagtgaccgccttgctcctgccgctggccttgctgctccacgccgccaggccggaggtgaaggtggt
ggagtctgggggagacttagtgaagcctggagggtccctgaaactctcctgtgtagtctctggattcactttcagta
gatatggcatgtcttgggttcgccagactccaggcaagaggctggagtgggtcgcaaccattagtggtggcggtact
tacatctactatccagacagtgtgaaggggcgattcaccatctccagagacaatgccaagaacaccctgtacctgca
aatgagcagtctgaagtctgaggacacagccatgtatcactgtacaagggataactacggtaggaactacgactacg
gtatggactactggggtcaaggaacctcagtcaccgtctcctcaggcggtggcggatccggcggtggcggatccggc
ggtggcggatcccaaattgttctcacccagtctccagcaatcatgtctgcatctccaggggaggaggtcaccctaac
ctgcagtgccacctcaagtgtaagttacatacactggttccagcagaggccaggcacttctcccaaactctggattt
atagcacatccaacctggcttctggagtccctgttcgcttcagtggcagtggatatgggacctcttactctctcaca
atcagccgaatggaggctgaagatgctgccacttattactgccagcaaaggagtagttccccattcacgttcggctc
ggggacaaagttggaaataaaaacaacaacccctgcccccagacctcctaccccagcccctacaattgccagccagc
ctctgagcctgaggcccgaggcttgtagacctgctgctggcggagccgtgcacaccagaggactggatttcgcctgc
gacatctacatctgggcgcccttggccgggacttgtggggtccttctcctgtcactggttatcaccctttactgcag
gagtaagaggagcaggctcctgcacagtgactacatgaacatgactcctagaagacctgggcctaccagaaagcatt
accagccctatgccccaccacgcgacttcgcagcctatcgctccagagtgaagttcagcaggagcgcagacgccccc
gcgtacaagcagggccagaaccagctctataacgagctcaatctaggacgaagagaggagtacgatgttttggacaa
gagacgtggccgggaccctgagatggggggaaagccgagaaggaagaaccctcaggaaggcctgtacaatgaactgc
agaaagataagatggcggaggcctacagtgagattgggatgaaaggcgagcgccggaggggcaaggggcacgatggc
ctttaccagggtctcagtacagccaccaaggacacctacgacgcccttcacatgcaggccctgccccctcgctgata
agtttaaactgccagaacatttctctggcctaactggccggtaccggcttcattttttccatttactgcagaggctt
cattttttccatttactgcagaggcttcattttttccatttactgcagaactagttaggcgtgtacggtgggaggcc
tatataagcagagctcgtttagtgaaccgtcagatcgcctggagacgccatccacgctgttttgacctccatagaag
acaccgggaccgatccagcctcgagagacccaatgctagccaccatggccttaccagtgaccgccttgctcctgccg
ctggccttgctgctccacgccgccaggccgtacttcggcaagctggaaagcaagctgagcgtgatccggaacctgaa
cgaccaggtgctgttcatcgatcagggcaacagacccctgttcgaggacatgaccgacagcgactgcagagacaacg
cccctcggaccatcttcatcatcagcatgtacaaggacagccagcctagaggcatggccgtgaccatctctgtgaag
tgcgagaagatcagcaccctgagctgcgagaacaagatcatcagcttcaaagagatgaacccgccggacaacatcaa
ggacaccaagagcgacatcatattcttccagcggagcgtgcccggccacgacaacaagatgcagtttgagagcagca
gctacgagggctacttcctggcctgcgagaaagagcgggacctgttcaagctgatcctgaagaaagaggacgaactg
ggcgaccgcagcatcatgttcaccgtgcagaacgaggactgataa
huMNE6-8-28-3z-Foxp3-NFAT-IL-18
(DNA)
(SEQ ID NO: 1654)
atggccttaccagtgaccgccttgctcctgccgctggccttgctgctccacgccgccaggccggaggtgcagctggt
ggagtctgggggaggcctggtcaagcctggggggtccctgagactctcctgtgcagcctctggattcaccttcagta
ggtatggcatgagctgggtccgccaggctccagggaagaggctggagtgggtctcaaccattagtggcggaggcacc
tacatatactacccagactcagtgaagggccgattcaccatctccagagacaacgccaagaacaccctgtatctgca
aatgaacagcctgagagccgaggacacggctgtgtattactgtaccagagataactatggccgcaactatgattatg
gcatggattattggggccagggcaccctggtgaccgtgagcagcggcggtggcggatccggcggtggcggatccggc
ggtggcggatccgaaattgtgttgacacagtctccagccaccctgtctttgtctccaggggaaagagccaccctcac
ctgcagcgccaccagcagtgttagctacatccactggtaccaacagaggcctggccagagccccaggctcctcatct
atagcacctccaacctggccagcggcatcccagccaggttcagtggcagtgggtctgggagcgactacactctcacc
atcagcagcctagagcctgaagattttgcagtttattactgtcagcagcgtagcagctcccctttcacctttggcag
cggcaccaaagtggaaattaaaacaacaacccctgcccccagacctcctaccccagcccctacaattgccagccagc
ctctgagcctgaggcccgaggcttgtagacctgctgctggcggagccgtgcacaccagaggactggatttcgcctgc
gacatctacatctgggcgcccttggccgggacttgtggggtccttctcctgtcactggttatcaccctttactgcag
gagtaagaggagcaggctcctgcacagtgactacatgaacatgactcctagaagacctgggcctaccagaaagcatt
accagccctatgccccaccacgcgacttcgcagcctatcgctccagagtgaagttcagcaggagcgcagacgccccc
gcgtacaagcagggccagaaccagctctataacgagctcaatctaggacgaagagaggagtacgatgttttggacaa
gagacgtggccgggaccctgagatggggggaaagccgagaaggaagaaccctcaggaaggcctgtacaatgaactgc
agaaagataagatggcggaggcctacagtgagattgggatgaaaggcgagcgccggaggggcaaggggcacgatggc
ctttaccagggtctcagtacagccaccaaggacacctacgacgcccttcacatgcaggccctgccccctcgctgata
agtttaaactgccagaacatttctctggcctaactggccggtaccggcttcattttttccatttactgcagaggctt
cattttttccatttactgcagaggcttcattttttccatttactgcagaactagttaggcgtgtacggtgggaggcc
tatataagcagagctcgtttagtgaaccgtcagatcgcctggagacgccatccacgctgttttgacctccatagaag
acaccgggaccgatccagcctcgagagacccaatgctagccaccatggccttaccagtgaccgccttgctcctgccg
ctggccttgctgctccacgccgccaggccgtacttcggcaagctggaaagcaagctgagcgtgatccggaacctgaa
cgaccaggtgctgttcatcgatcagggcaacagacccctgttcgaggacatgaccgacagcgactgcagagacaacg
cccctcggaccatcttcatcatcagcatgtacaaggacagccagcctagaggcatggccgtgaccatctctgtgaag
tgcgagaagatcagcaccctgagctgcgagaacaagatcatcagcttcaaagagatgaacccgccggacaacatcaa
ggacaccaagagcgacatcatattcttccagcggagcgtgcccggccacgacaacaagatgcagtttgagagcagca
gctacgagggctacttcctggcctgcgagaaagagcgggacctgttcaagctgatcctgaagaaagaggacgaactg
ggcgaccgcagcatcatgttcaccgtgcagaacgaggactgataa
muMNE6-8-4-1BB-3z1XX-Foxp3-NFAT-IL-18
(DNA)
(SEQ ID NO: 1655)
atggccttaccagtgaccgccttgctcctgccgctggccttgctgctccacgccgccaggccggaggtgaaggtggt
ggagtctgggggagacttagtgaagcctggagggtccctgaaactctcctgtgtagtctctggattcactttcagta
gatatggcatgtcttgggttcgccagactccaggcaagaggctggagtgggtcgcaaccattagtggtggcggtact
tacatctactatccagacagtgtgaaggggcgattcaccatctccagagacaatgccaagaacaccctgtacctgca
aatgagcagtctgaagtctgaggacacagccatgtatcactgtacaagggataactacggtaggaactacgactacg
gtatggactactggggtcaaggaacctcagtcaccgtctcctcaggcggtggcggatccggcggtggcggatccggc
ggtggcggatcccaaattgttctcacccagtctccagcaatcatgtctgcatctccaggggaggaggtcaccctaac
ctgcagtgccacctcaagtgtaagttacatacactggttccagcagaggccaggcacttctcccaaactctggattt
atagcacatccaacctggcttctggagtccctgttcgcttcagtggcagtggatatgggacctcttactctctcaca
atcagccgaatggaggctgaagatgctgccacttattactgccagcaaaggagtagttccccattcacgttcggctc
ggggacaaagttggaaataaaaacaacaacccctgcccccagacctcctaccccagcccctacaattgccagccagc
ctctgagcctgaggcccgaggcttgtagacctgctgctggcggagccgtgcacaccagaggactggatttcgcctgc
gacatctacatctgggcgcccttggccgggacttgtggggtccttctcctgtcactggttatcaccctttactgcaa
acggggcagaaagaaactcctgtatatattcaaacaaccatttatgagaccagtacaaactactcaagaggaagatg
gctgtagctgccgatttccagaagaagaagaaggaggatgtgaactgagagtgaagttcagcaggagcgcagacgcc
cccgcgtacaagcagggccagaaccagctctataacgagctcaatctaggacgaagagaggagtacgatgttttgga
caagagacgtggccgggaccctgagatggggggaaagccgagaaggaagaaccctcaggaaggcctgttcaatgaac
tgcagaaagataagatggcggaggccttcagtgagattgggatgaaaggcgagcgccggaggggcaaggggcacgat
ggccttttccagggtctcagtacagccaccaaggacaccttcgacgcccttcacatgcaggccctgccccctcgctg
ataagtttaaactgccagaacatttctctggcctaactggccggtaccggcttcattttttccatttactgcagagg
cttcattttttccatttactgcagaggcttcattttttccatttactgcagaactagttaggcgtgtacggtgggag
gcctatataagcagagctcgtttagtgaaccgtcagatcgcctggagacgccatccacgctgttttgacctccatag
aagacaccgggaccgatccagcctcgagagacccaatgctagccaccatggccttaccagtgaccgccttgctcctg
ccgctggccttgctgctccacgccgccaggccgtacttcggcaagctggaaagcaagctgagcgtgatccggaacct
gaacgaccaggtgctgttcatcgatcagggcaacagacccctgttcgaggacatgaccgacagcgactgcagagaca
acgcccctcggaccatcttcatcatcagcatgtacaaggacagccagcctagaggcatggccgtgaccatctctgtg
aagtgcgagaagatcagcaccctgagctgcgagaacaagatcatcagcttcaaagagatgaacccgccggacaacat
caaggacaccaagagcgacatcatattcttccagcggagcgtgcccggccacgacaacaagatgcagtttgagagca
gcagctacgagggctacttcctggcctgcgagaaagagcgggacctgttcaagctgatcctgaagaaagaggacgaa
ctgggcgaccgcagcatcatgttcaccgtgcagaacgaggactgataa
huMNE6-8-4-1BB-3z1XX-Foxp3-NFAT-IL-18
(DNA)
(SEQ ID NO: 1656)
atggccttaccagtgaccgccttgctcctgccgctggccttgctgctccacgccgccaggccggaggtgcagctggt
ggagtctgggggaggcctggtcaagcctggggggtccctgagactctcctgtgcagcctctggattcaccttcagta
ggtatggcatgagctgggtccgccaggctccagggaagaggctggagtgggtctcaaccattagtggcggaggcacc
tacatatactacccagactcagtgaagggccgattcaccatctccagagacaacgccaagaacaccctgtatctgca
aatgaacagcctgagagccgaggacacggctgtgtattactgtaccagagataactatggccgcaactatgattatg
gcatggattattggggccagggcaccctggtgaccgtgagcagcggcggtggcggatccggcggtggcggatccggc
ggtggcggatccgaaattgtgttgacacagtctccagccaccctgtctttgtctccaggggaaagagccaccctcac
ctgcagcgccaccagcagtgttagctacatccactggtaccaacagaggcctggccagagccccaggctcctcatct
atagoacctccaacctggccagcggcatcccagccaggttcagtggcagtgggtctgggagcgactacactctcacc
atcagcagoctagagcctgaagattttgcagtttattactgtcagcagcgtagcagctcccctttcacctttggcag
oggoaccaaagtggaaattaaaacaacaacccctgcccccagacctcctaccccagcccctacaattgccagccagc
ctctgagcctgaggcccgaggcttgtagacctgctgctggcggagccgtgcacaccagaggactggatttcgcctgc
gacatctacatctgggcgcccttggccgggacttgtggggtccttctcctgtcactggttatcaccctttactgcaa
acggggcagaaagaaactcctgtatatattcaaacaaccatttatgagaccagtacaaactactcaagaggaagatg
gotgtagctgccgatttccagaagaagaagaaggaggatgtgaactgagagtgaagttcagcaggagcgcagacgcc
cccgcgtacaagcagggccagaaccagotctataacgagctcaatctaggacgaagagaggagtacgatgttttgga
caagagacgtggcogggaccctgagatggggggaaagccgagaaggaagaaccctcaggaaggcctgttcaatgaac
tgcagaaagataagatggoggaggccttcagtgagattgggatgaaaggcgagcgccggaggggcaaggggcacgat
ggccttttccagggtctcagtacagccaccaaggacaccttcgacgcccttcacatgcaggccctgccccctcgctg
ataagtttaaactgocagaacatttctctggcctaactggccggtaccggcttcattttttccatttactgcagagg
cttcattttttccatttactgcagaggcttcattttttccatttactgcagaactagttaggcgtgtacggtgggag
goctatataagcagagctcgtttagtgaaccgtcagatcgcctggagacgccatccacgctgttttgacctccatag
aagacacogggaccgatccagcctcgagagacccaatgctagccaccatggccttaccagtgaccgccttgctcctg
cogotggccttgctgctccacgccgccaggccgtacttcggcaagctggaaagcaagctgagcgtgatccggaacct
gaacgaccaggtgotgttcatcgatcagggcaacagacccctgttcgaggacatgaccgacagcgactgcagagaca
acgcccctoggaccatcttcatcatcagcatgtacaaggacagccagcctagaggcatggccgtgaccatctctgtg
aagtgogagaagatcagcaccctgagctgcgagaacaagatcatcagcttcaaagagatgaacccgccggacaacat
caaggacaccaagagogacatcatattcttccagcggagcgtgcccggccacgacaacaagatgcagtttgagagca
gcagotacgagggctacttcctggcctgcgagaaagagcgggacctgttcaagctgatcctgaagaaagaggacgaa
ctgggcgaccgcagcatcatgttcaccgtgcagaacgaggactgataa
muMNE6-8-28-3z1XX-Foxp3-NFAT-IL-18
(DNA)
(SEQ ID NO: 1657)
atggccttaccagtgaccgccttgctcctgccgctggccttgctgctccacgccgccaggccggaggtgaaggtggt
ggagtctgggggagacttagtgaagcctggagggtccctgaaactctcctgtgtagtctctggattcactttcagta
gatatggcatgtcttgggttcgccagactccaggcaagaggctggagtgggtcgcaaccattagtggtggcggtact
tacatctactatccagacagtgtgaaggggcgattcaccatctccagagacaatgccaagaacaccctgtacctgca
aatgagcagtctgaagtctgaggacacagccatgtatcactgtacaagggataactacggtaggaactacgactacg
gtatggactactggggtcaaggaacctcagtcaccgtctcctcaggcggtggcggatccggcggtggcggatccggc
ggtggcggatcccaaattgttctcacccagtctccagcaatcatgtctgcatctccaggggaggaggtcaccctaac
ctgcagtgccacctcaagtgtaagttacatacactggttccagcagaggccaggcacttctcccaaactctggattt
atagcacatccaacctggcttctggagtccctgttcgcttcagtggcagtggatatgggacctcttactctctcaca
atcagccgaatggaggctgaagatgctgccacttattactgccagcaaaggagtagttccccattcacgttcggctc
ggggacaaagttggaaataaaaacaacaacccctgcccccagacctcctaccccagcccctacaattgccagccagc
ctctgagcctgaggcccgaggcttgtagacctgctgctggcggagccgtgcacaccagaggactggatttcgcctgc
gacatctacatctgggcgcccttggccgggacttgtggggtccttctcctgtcactggttatcaccctttactgcag
gagtaagaggagcaggctcctgcacagtgactacatgaacatgactcctagaagacctgggcctaccagaaagcatt
accagccctatgccccaccacgcgacttcgcagcctatcgctccagagtgaagttcagcaggagcgcagacgccccc
gcgtacaagcagggccagaaccagctctataacgagctcaatctaggacgaagagaggagtacgatgttttggacaa
gagacgtggccgggaccctgagatggggggaaagccgagaaggaagaaccctcaggaaggcctgttcaatgaactgc
agaaagataagatggcggaggccttcagtgagattgggatgaaaggcgagcgccggaggggcaaggggcacgatggc
cttttccagggtctcagtacagccaccaaggacaccttcgacgcccttcacatgcaggccctgccccctcgctgata
agtttaaactgccagaacatttctctggcctaactggccggtaccggcttcattttttccatttactgcagaggctt
cattttttccatttactgcagaggcttcattttttccatttactgcagaactagttaggcgtgtacggtgggaggcc
tatataagcagagctcgtttagtgaaccgtcagatcgcctggagacgccatccacgctgttttgacctccatagaag
acaccgggaccgatccagcctcgagagacccaatgctagccaccatggccttaccagtgaccgccttgctcctgccg
ctggccttgctgctccacgccgccaggccgtacttcggcaagctggaaagcaagctgagcgtgatccggaacctgaa
cgaccaggtgctgttcatcgatcagggcaacagacccctgttcgaggacatgaccgacagcgactgcagagacaacg
cccctcggaccatcttcatcatcagcatgtacaaggacagccagcctagaggcatggccgtgaccatctctgtgaag
tgcgagaagatcagcaccctgagctgcgagaacaagatcatcagcttcaaagagatgaacccgccggacaacatcaa
ggacaccaagagcgacatcatattcttccagcggagcgtgcccggccacgacaacaagatgcagtttgagagcagca
gctacgagggctacttcctggcctgcgagaaagagcgggacctgttcaagctgatcctgaagaaagaggacgaactg
ggcgaccgcagcatcatgttcaccgtgcagaacgaggactgataa
huMNE6-8-28-3z1XX-Foxp3-NFAT-IL-18
(DNA)
(SEQ ID NO: 1658)
atggccttaccagtgaccgccttgctcctgccgctggccttgctgctccacgccgccaggccggaggtgcagctggt
ggagtctgggggaggcctggtcaagcctggggggtccctgagactctcctgtgcagcctctggattcaccttcagta
ggtatggcatgagctgggtccgccaggctccagggaagaggctggagtgggtctcaaccattagtggcggaggcacc
tacatatactacccagactcagtgaagggccgattcaccatctccagagacaacgccaagaacaccctgtatctgca
aatgaacagcctgagagccgaggacacggctgtgtattactgtaccagagataactatggccgcaactatgattatg
gcatggattattggggccagggcaccctggtgaccgtgagcagcggcggtggcggatccggcggtggcggatccggc
ggtggcggatccgaaattgtgttgacacagtctccagccaccctgtctttgtctccaggggaaagagccaccctcac
ctgcagcgccaccagcagtgttagctacatccactggtaccaacagaggcctggccagagccccaggctcctcatct
atagcacctccaacctggccagcggcatcccagccaggttcagtggcagtgggtctgggagcgactacactctcacc
atcagcagcctagagcctgaagattttgcagtttattactgtcagcagcgtagcagctcccctttcacctttggcag
cggcaccaaagtggaaattaaaacaacaacccctgcccccagacctcctaccccagcccctacaattgccagccagc
ctctgagcctgaggcccgaggcttgtagacctgctgctggcggagccgtgcacaccagaggactggatttcgcctgc
gacatctacatctgggcgcccttggccgggacttgtggggtccttctcctgtcactggttatcaccctttactgcag
gagtaagaggagcaggctcctgcacagtgactacatgaacatgactcctagaagacctgggcctaccagaaagcatt
accagccctatgccccaccacgcgacttcgcagcctatcgctccagagtgaagttcagcaggagcgcagacgccccc
gcgtacaagcagggccagaaccagctctataacgagctcaatctaggacgaagagaggagtacgatgttttggacaa
gagacgtggccgggaccctgagatggggggaaagccgagaaggaagaaccctcaggaaggcctgttcaatgaactgc
agaaagataagatggcggaggccttcagtgagattgggatgaaaggcgagcgccggaggggcaaggggcacgatggc
cttttccagggtctcagtacagccaccaaggacaccttcgacgcccttcacatgcaggccctgccccctcgctgata
agtttaaactgccagaacatttctctggcctaactggccggtaccggcttcattttttccatttactgcagaggctt
cattttttccatttactgcagaggcttcattttttccatttactgcagaactagttaggcgtgtacggtgggaggcc
tatataagcagagctcgtttagtgaaccgtcagatcgcctggagacgccatccacgctgttttgacctccatagaag
acaccgggaccgatccagcctcgagagacccaatgctagccaccatggccttaccagtgaccgccttgctcctgccg
ctggccttgctgctccacgccgccaggccgtacttcggcaagctggaaagcaagctgagcgtgatccggaacctgaa
cgaccaggtgctgttcatcgatcagggcaacagacccctgttcgaggacatgaccgacagcgactgcagagacaacg
cccctcggaccatcttcatcatcagcatgtacaaggacagccagcctagaggcatggccgtgaccatctctgtgaag
tgcgagaagatcagcaccctgagctgcgagaacaagatcatcagcttcaaagagatgaacccgccggacaacatcaa
ggacaccaagagcgacatcatattcttccagcggagcgtgcccggccacgacaacaagatgcagtttgagagcagca
gctacgagggctacttcctggcctgcgagaaagagcgggacctgttcaagctgatcctgaagaaagaggacgaactg
ggcgaccgcagcatcatgttcaccgtgcagaacgaggactgataa
20A10
mu20A10-8-4-1BB-3z-Foxp3-NFAT-IL-18
(DNA)
(SEQ ID NO: 1659)
atggccttaccagtgaccgccttgctcctgccgctggccttgctgctccacgccgccaggccggaagtgatgctggt
ggaatctggcggcggactggttaagcctggcggatctctgaagctgagctgtgccgccagcggcttcacctttagca
catacgccatgagctggatccggcagacccctgagaagagactggaatgggttgccagcatcggcagagccggcagc
acctactacagcgattctgtgaagggcagattcaccatcagccgggacaacgtgcggaacatcctgtacctgcagat
gagcagcctgcggagcgaggataccgccatgtactactgtgccagaggacccatctacaacgactacgacgagttcg
cctattggggccagggcacactggttacagtttctgctggtggcggaggatctggcggaggtggaagcggcggaggc
ggatccaatatcatgatgacacagagcccgagcagcctggctgtgtctgctggcgagaaagtgaccatgtcctgcaa
gagcagccagagcgtgctgtactccagcaaccagaagaactacctggcctggtatcagcagaagcccggccagtctc
ctaagctgctgatctactgggccagcaccagagaaagcggcgtgcccgatagattcacaggcagcggcagcggaacc
gacttcaccctgacaatcagctctgtgcaggccgaagatctggccgtgtactattgccaccagtacctgtccagcct
gacctttggcgccggaacaaagctggaactgaagacaacaacccctgcccccagacctcctaccccagcccctacaa
ttgccagccagcctctgagcctgaggcccgaggcttgtagacctgctgctggcggagccgtgcacaccagaggactg
gatttcgcctgcgacatctacatctgggcgcccttggccgggacttgtggggtccttctcctgtcactggttatcac
cctttactgcaaacggggcagaaagaaactcctgtatatattcaaacaaccatttatgagaccagtacaaactactc
aagaggaagatggctgtagctgccgatttccagaagaagaagaaggaggatgtgaactgagagtgaagttcagcagg
agcgcagacgcccccgcgtacaagcagggccagaaccagctctataacgagctcaatctaggacgaagagaggagta
cgatgttttggacaagagacgtggccgggaccctgagatggggggaaagccgagaaggaagaaccctcaggaaggcc
tgtacaatgaactgcagaaagataagatggcggaggcctacagtgagattgggatgaaaggcgagcgccggaggggc
aaggggcacgatggcctttaccagggtctcagtacagccaccaaggacacctacgacgcccttcacatgcaggccct
gccccctcgctgataagtttaaactgccagaacatttctctggcctaactggccggtaccggcttcattttttccat
ttactgcagaggcttcattttttccatttactgcagaggcttcattttttccatttactgcagaactagttaggcgt
gtacggtgggaggcctatataagcagagctcgtttagtgaaccgtcagatcgcctggagacgccatccacgctgttt
tgacctccatagaagacaccgggaccgatccagcctcgagagacccaatgctagccaccatggccttaccagtgacc
gocttgctcctgccgctggccttgctgctccacgccgccaggccgtacttcggcaagctggaaagcaagctgagcgt
gatcoggaacctgaacgaccaggtgctgttcatcgatcagggcaacagacccctgttcgaggacatgaccgacagcg
actgcagagacaacgcccctoggaccatcttcatcatcagcatgtacaaggacagccagcctagaggcatggccgtg
accatctctgtgaagtgcgagaagatcagcaccctgagctgcgagaacaagatcatcagcttcaaagagatgaaccc
gcoggacaacatcaaggacaccaagagcgacatcatattcttccagcggagcgtgcccggccacgacaacaagatgc
agtttgagagcagcagotacgagggctacttcctggcctgcgagaaagagcgggacctgttcaagctgatcctgaag
aaagaggacgaactgggcgaccgcagcatcatgttcaccgtgcagaacgaggactgataa
hu20A10-8-4-1BB-3z-Foxp3-NFAT-IL-18
(DNA)
(SEQ ID NO: 1660)
atggccttaccagtgaccgccttgctcctgccgctggccttgctgctccacgccgccaggccggaggtgcagctggt
tgaatctggcggcggacttgtgaagcctggcggatctctgagactgagctgtgccgccagcggcttcacctttagca
catacgccatgagctgggtccgacaggcccctggaaaaggccttgaatgggttgcctctatcggcagagccggcagc
acctactacagcgattctgtgaagggcagattcaccatcagccgggacaacgccaagaacagcctgtacctgcagat
gaactccctgagagccgaggacaccgccgtgtactattgtgccagaggacccatctacaacgactacgacgagttcg
cctattggggccagggcacactggtcacagtcagctctggcggtggcggaagcggaggcggtggctccggtggcgga
ggcagcgacattgtgctgacccagtctccagcctccttggccgtgtctccaggacagagggccaccatcacctgcaa
gagcagccagagcgtgctgtactccagcaaccagaagaactacctggcctggtatcagcagaaaccaggacaacctc
ctaaactcctgatttactgggccagcaccagagaaagcggggtcccagccaggttcagcggcagtgggtctgggacc
gatttcaccctcacaattaatcctgtggaagctaatgatactgcaaattattactgtcaccagtacctgagcagcct
gaccttcggcggagggaccaaggtggagatcaaacgaacaacaacccctgcccccagacctcctaccccagccccta
caattgccagccagcctctgagcctgaggcccgaggcttgtagacctgctgctggcggagccgtgcacaccagagga
ctggatttcgcctgcgacatctacatctgggcgcccttggccgggacttgtggggtccttctcctgtcactggttat
caccctttactgcaaacggggcagaaagaaactcctgtatatattcaaacaaccatttatgagaccagtacaaacta
ctcaagaggaagatggctgtagctgccgatttccagaagaagaagaaggaggatgtgaactgagagtgaagttcagc
aggagcgcagacgcccccgcgtacaagcagggccagaaccagctctataacgagctcaatctaggacgaagagagga
gtacgatgttttggacaagagacgtggccgggaccctgagatggggggaaagccgagaaggaagaaccctcaggaag
gcctgtacaatgaactgcagaaagataagatggcggaggcctacagtgagattgggatgaaaggcgagcgccggagg
ggcaaggggcacgatggcctttaccagggtctcagtacagccaccaaggacacctacgacgcccttcacatgcaggc
cctgccccctcgctgataagtttaaactgccagaacatttctctggcctaactggccggtaccggcttcattttttc
catttactgcagaggcttcattttttccatttactgcagaggcttcattttttccatttactgcagaactagttagg
cgtgtacggtgggaggcctatataagcagagctcgtttagtgaaccgtcagatcgcctggagacgccatccacgctg
ttttgacctccatagaagacaccgggaccgatccagcctcgagagacccaatgctagccaccatggccttaccagtg
accgccttgctcctgccgctggccttgctgctccacgccgccaggccgtacttcggcaagctggaaagcaagctgag
cgtgatccggaacctgaacgaccaggtgctgttcatcgatcagggcaacagacccctgttcgaggacatgaccgaca
gcgactgcagagacaacgcccctcggaccatcttcatcatcagcatgtacaaggacagccagcctagaggcatggcc
gtgaccatctctgtgaagtgcgagaagatcagcaccctgagctgcgagaacaagatcatcagcttcaaagagatgaa
cccgccggacaacatcaaggacaccaagagcgacatcatattcttccagcggagcgtgcccggccacgacaacaaga
tgcagtttgagagcagcagctacgagggctacttcctggcctgcgagaaagagcgggacctgttcaagctgatcctg
aagaaagaggacgaactgggcgaccgcagcatcatgttcaccgtgcagaacgaggactgataa
mu20A10-8-28-3z-Foxp3-NFAT-IL-18
(DNA)
(SEQ ID NO: 1661)
atggccttaccagtgaccgccttgctcctgccgctggccttgctgctccacgccgccaggccggaagtgatgctggt
ggaatctggcggcggactggttaagcctggcggatctctgaagctgagctgtgccgccagcggcttcacctttagca
catacgccatgagctggatccggcagacccctgagaagagactggaatgggttgccagcatcggcagagccggcagc
acctactacagcgattctgtgaagggcagattcaccatcagccgggacaacgtgcggaacatcctgtacctgcagat
gagcagcctgcggagcgaggataccgccatgtactactgtgccagaggacccatctacaacgactacgacgagttcg
cctattggggccagggcacactggttacagtttctgctggtggcggaggatctggcggaggtggaagcggcggaggc
ggatccaatatcatgatgacacagagcccgagcagcctggctgtgtctgctggcgagaaagtgaccatgtcctgcaa
gagcagccagagcgtgctgtactccagcaaccagaagaactacctggcctggtatcagcagaagcccggccagtctc
ctaagctgctgatctactgggccagcaccagagaaagcggcgtgcccgatagattcacaggcagcggcagcggaacc
gacttcaccctgacaatcagctctgtgcaggccgaagatctggccgtgtactattgccaccagtacctgtccagcct
gacctttggcgccggaacaaagctggaactgaagacaacaacccctgcccccagacctcctaccccagcccctacaa
ttgocagccagcctctgagcctgaggcccgaggcttgtagacctgctgctggcggagccgtgcacaccagaggactg
gatttogoctgcgacatctacatctgggcgcccttggccgggacttgtggggtccttctcctgtcactggttatcac
cctttactgcaggagtaagaggagcaggctcctgcacagtgactacatgaacatgactcctagaagacctgggccta
ccagaaagcattaccagocctatgccccaccacgcgacttcgcagcctatcgctccagagtgaagttcagcaggagc
gcagacgcccccgcgtacaagcagggccagaaccagotctataacgagctcaatctaggacgaagagaggagtacga
tgttttggacaagagacgtggcogggaccctgagatggggggaaagccgagaaggaagaaccctcaggaaggcctgt
acaatgaactgcagaaagataagatggoggaggcctacagtgagattgggatgaaaggcgagcgccggaggggcaag
gggcacgatggcctttaccagggtctcagtacagccaccaaggacacctacgacgcccttcacatgcaggccctgcc
ccctogotgataagtttaaactgccagaacatttctctggcctaactggccggtaccggcttcattttttccattta
ctgcagaggcttcattttttccatttactgcagaggcttcattttttccatttactgcagaactagttaggcgtgta
oggtgggaggcctatataagcagagctcgtttagtgaaccgtcagatcgcctggagacgccatccacgctgttttga
cctccatagaagacaccgggaccgatccagcctcgagagacccaatgctagccaccatggccttaccagtgaccgcc
ttgotcctgccgctggccttgctgctccacgccgccaggccgtacttcggcaagctggaaagcaagctgagcgtgat
coggaacctgaacgaccaggtgctgttcatcgatcagggcaacagacccctgttcgaggacatgaccgacagcgact
gcagagacaacgcccctoggaccatcttcatcatcagcatgtacaaggacagccagcctagaggcatggccgtgacc
atctctgtgaagtgcgagaagatcagcaccctgagctgcgagaacaagatcatcagcttcaaagagatgaacccgcc
ggacaacatcaaggacaccaagagogacatcatattcttccagcggagcgtgcccggccacgacaacaagatgcagt
ttgagagcagcagotacgagggctacttcctggcctgcgagaaagagcgggacctgttcaagctgatcctgaagaaa
gaggacgaactgggcgaccgcagcatcatgttcaccgtgcagaacgaggactgataa
hu20A10-8-28-3z-Foxp3-NFAT-IL-18
(DNA)
(SEQ ID NO: 1662)
atggccttaccagtgaccgccttgctcctgccgctggccttgctgctccacgccgccaggccggaggtgcagctggt
tgaatctggcggcggacttgtgaagcctggcggatctctgagactgagctgtgccgccagcggcttcacctttagca
catacgccatgagctgggtccgacaggcccctggaaaaggccttgaatgggttgcctctatcggcagagccggcagc
acctactacagcgattctgtgaagggcagattcaccatcagccgggacaacgccaagaacagcctgtacctgcagat
gaactccctgagagccgaggacaccgccgtgtactattgtgccagaggacccatctacaacgactacgacgagttcg
cctattggggccagggcacactggtcacagtcagctctggcggtggcggaagcggaggcggtggctccggtggcgga
ggcagcgacattgtgctgacccagtctccagcctccttggccgtgtctccaggacagagggccaccatcacctgcaa
gagcagccagagcgtgctgtactccagcaaccagaagaactacctggcctggtatcagcagaaaccaggacaacctc
ctaaactcctgatttactgggccagcaccagagaaagcggggtcccagccaggttcagcggcagtgggtctgggacc
gatttcaccctcacaattaatcctgtggaagctaatgatactgcaaattattactgtcaccagtacctgagcagcct
gaccttcggcggagggaccaaggtggagatcaaacgaacaacaacccctgcccccagacctcctaccccagccccta
caattgccagccagcctctgagcctgaggcccgaggcttgtagacctgctgctggcggagccgtgcacaccagagga
ctggatttcgcctgcgacatctacatctgggcgcccttggccgggacttgtggggtccttctcctgtcactggttat
caccctttactgcaggagtaagaggagcaggctcctgcacagtgactacatgaacatgactcctagaagacctgggc
ctaccagaaagcattaccagccctatgccccaccacgcgacttcgcagcctatcgctccagagtgaagttcagcagg
agcgcagacgcccccgcgtacaagcagggccagaaccagctctataacgagctcaatctaggacgaagagaggagta
cgatgttttggacaagagacgtggccgggaccctgagatggggggaaagccgagaaggaagaaccctcaggaaggcc
tgtacaatgaactgcagaaagataagatggcggaggcctacagtgagattgggatgaaaggcgagcgccggaggggc
aaggggcacgatggcctttaccagggtctcagtacagccaccaaggacacctacgacgcccttcacatgcaggccct
gccccctcgctgataagtttaaactgccagaacatttctctggcctaactggccggtaccggcttcattttttccat
ttactgcagaggcttcattttttccatttactgcagaggcttcattttttccatttactgcagaactagttaggcgt
gtacggtgggaggcctatataagcagagctcgtttagtgaaccgtcagatcgcctggagacgccatccacgctgttt
tgacctccatagaagacaccgggaccgatccagcctcgagagacccaatgctagccaccatggccttaccagtgacc
gccttgctcctgccgctggccttgctgctccacgccgccaggccgtacttcggcaagctggaaagcaagctgagcgt
gatccggaacctgaacgaccaggtgctgttcatcgatcagggcaacagacccctgttcgaggacatgaccgacagcg
actgcagagacaacgcccctcggaccatcttcatcatcagcatgtacaaggacagccagcctagaggcatggccgtg
accatctctgtgaagtgcgagaagatcagcaccctgagctgcgagaacaagatcatcagcttcaaagagatgaaccc
gccggacaacatcaaggacaccaagagcgacatcatattcttccagcggagcgtgcccggccacgacaacaagatgc
agtttgagagcagcagctacgagggctacttcctggcctgcgagaaagagcgggacctgttcaagctgatcctgaag
aaagaggacgaactgggcgaccgcagcatcatgttcaccgtgcagaacgaggactgataa
mu20A10-8-4-1BB-3z1XX-Foxp3-NFAT-IL-18
(DNA)
(SEQ ID NO: 1663)
atggccttaccagtgaccgccttgctcctgccgctggccttgctgctccacgccgccaggccggaagtgatgctggt
ggaatctggcggcggactggttaagcctggcggatctctgaagctgagctgtgccgccagcggcttcacctttagca
catacgccatgagctggatccggcagacccctgagaagagactggaatgggttgccagcatcggcagagccggcagc
acctactacagcgattctgtgaagggcagattcaccatcagccgggacaacgtgcggaacatcctgtacctgcagat
gagcagcctgcggagcgaggataccgccatgtactactgtgccagaggacccatctacaacgactacgacgagttcg
cctattggggccagggcacactggttacagtttctgctggtggcggaggatctggcggaggtggaagcggcggaggc
ggatccaatatcatgatgacacagagcccgagcagcctggctgtgtctgctggcgagaaagtgaccatgtcctgcaa
gagcagccagagcgtgctgtactccagcaaccagaagaactacctggcctggtatcagcagaagcccggccagtctc
ctaagctgctgatctactgggccagcaccagagaaagcggcgtgcccgatagattcacaggcagcggcagcggaacc
gacttcaccctgacaatcagctctgtgcaggccgaagatctggccgtgtactattgccaccagtacctgtccagcct
gacctttggcgccggaacaaagctggaactgaagacaacaacccctgcccccagacctcctaccccagcccctacaa
ttgccagccagcctctgagcctgaggcccgaggcttgtagacctgctgctggcggagccgtgcacaccagaggactg
gatttcgcctgcgacatctacatctgggcgcccttggccgggacttgtggggtccttctcctgtcactggttatcac
cctttactgcaaacggggcagaaagaaactcctgtatatattcaaacaaccatttatgagaccagtacaaactactc
aagaggaagatggctgtagctgccgatttccagaagaagaagaaggaggatgtgaactgagagtgaagttcagcagg
agcgcagacgcccccgcgtacaagcagggccagaaccagctctataacgagctcaatctaggacgaagagaggagta
cgatgttttggacaagagacgtggccgggaccctgagatggggggaaagccgagaaggaagaaccctcaggaaggcc
tgttcaatgaactgcagaaagataagatggcggaggccttcagtgagattgggatgaaaggcgagcgccggaggggc
aaggggcacgatggccttttccagggtctcagtacagccaccaaggacaccttcgacgcccttcacatgcaggccct
gccccctcgctgataagtttaaactgccagaacatttctctggcctaactggccggtaccggcttcattttttccat
ttactgcagaggcttcattttttccatttactgcagaggcttcattttttccatttactgcagaactagttaggcgt
gtacggtgggaggcctatataagcagagctcgtttagtgaaccgtcagatcgcctggagacgccatccacgctgttt
tgacctccatagaagacaccgggaccgatccagcctcgagagacccaatgctagccaccatggccttaccagtgacc
gccttgctcctgccgctggccttgctgctccacgccgccaggccgtacttcggcaagctggaaagcaagctgagcgt
gatccggaacctgaacgaccaggtgctgttcatcgatcagggcaacagacccctgttcgaggacatgaccgacagcg
actgcagagacaacgcccctcggaccatcttcatcatcagcatgtacaaggacagccagcctagaggcatggccgtg
accatctctgtgaagtgcgagaagatcagcaccctgagctgcgagaacaagatcatcagcttcaaagagatgaaccc
gccggacaacatcaaggacaccaagagcgacatcatattcttccagcggagcgtgcccggccacgacaacaagatgc
agtttgagagcagcagctacgagggctacttcctggcctgcgagaaagagcgggacctgttcaagctgatcctgaag
aaagaggacgaactgggcgaccgcagcatcatgttcaccgtgcagaacgaggactgataa
hu20A10-8-4-1BB-3z1XX-Foxp3-NFAT-IL-18
(DNA)
(SEQ ID NO: 1664)
atggccttaccagtgaccgccttgctcctgccgctggccttgctgctccacgccgccaggccggaggtgcagctggt
tgaatctggcggcggacttgtgaagcctggcggatctctgagactgagctgtgccgccagcggcttcacctttagca
catacgccatgagctgggtccgacaggcccctggaaaaggccttgaatgggttgcctctatcggcagagccggcagc
acctactacagcgattctgtgaagggcagattcaccatcagccgggacaacgccaagaacagcctgtacctgcagat
gaactccctgagagccgaggacaccgccgtgtactattgtgccagaggacccatctacaacgactacgacgagttcg
cctattggggccagggcacactggtcacagtcagctctggcggtggcggaagcggaggcggtggctccggtggcgga
ggcagcgacattgtgctgacccagtctccagcctccttggccgtgtctccaggacagagggccaccatcacctgcaa
gagcagccagagcgtgctgtactccagcaaccagaagaactacctggcctggtatcagcagaaaccaggacaacctc
ctaaactcctgatttactgggccagcaccagagaaagcggggtcccagccaggttcagcggcagtgggtctgggacc
gatttcaccctcacaattaatcctgtggaagctaatgatactgcaaattattactgtcaccagtacctgagcagcct
gaccttcggcggagggaccaaggtggagatcaaacgaacaacaacccctgcccccagacctcctaccccagccccta
caattgccagccagcctctgagcctgaggcccgaggcttgtagacctgctgctggcggagccgtgcacaccagagga
ctggatttcgcctgcgacatctacatctgggcgcccttggccgggacttgtggggtccttctcctgtcactggttat
caccctttactgcaaacggggcagaaagaaactcctgtatatattcaaacaaccatttatgagaccagtacaaacta
ctcaagaggaagatggctgtagctgccgatttccagaagaagaagaaggaggatgtgaactgagagtgaagttcagc
aggagcgcagacgcccccgcgtacaagcagggccagaaccagctctataacgagctcaatctaggacgaagagagga
gtacgatgttttggacaagagacgtggccgggaccctgagatggggggaaagccgagaaggaagaaccctcaggaag
gcctgttcaatgaactgcagaaagataagatggcggaggccttcagtgagattgggatgaaaggcgagcgccggagg
ggcaaggggcacgatggccttttccagggtctcagtacagccaccaaggacaccttcgacgcccttcacatgcaggc
cctgccccctcgctgataagtttaaactgccagaacatttctctggcctaactggccggtaccggcttcattttttc
catttactgcagaggcttcattttttccatttactgcagaggcttcattttttccatttactgcagaactagttagg
cgtgtacggtgggaggcctatataagcagagctcgtttagtgaaccgtcagatcgcctggagacgccatccacgctg
ttttgacctccatagaagacaccgggaccgatccagcctcgagagacccaatgctagccaccatggccttaccagtg
accgccttgctcctgccgctggccttgctgctccacgccgccaggccgtacttcggcaagctggaaagcaagctgag
cgtgatccggaacctgaacgaccaggtgctgttcatcgatcagggcaacagacccctgttcgaggacatgaccgaca
gcgactgcagagacaacgcccctcggaccatcttcatcatcagcatgtacaaggacagccagcctagaggcatggcc
gtgaccatctctgtgaagtgcgagaagatcagcaccctgagctgcgagaacaagatcatcagcttcaaagagatgaa
cccgcoggacaacatcaaggacaccaagagcgacatcatattcttccagcggagcgtgcccggccacgacaacaaga
tgcagtttgagagcagcagotacgagggctacttcctggcctgcgagaaagagcgggacctgttcaagctgatcctg
aagaaagaggacgaactgggcgaccgcagcatcatgttcaccgtgcagaacgaggactgataa
mu20A10-8-28-3z1XX-Foxp3-NFAT-IL-18
(DNA)
(SEQ ID NO: 1665)
atggccttaccagtgaccgccttgctcctgccgctggccttgctgctccacgccgccaggccggaagtgatgctggt
ggaatctggcggcggactggttaagcctggcggatctctgaagctgagctgtgccgccagcggcttcacctttagca
catacgccatgagctggatccggcagacccctgagaagagactggaatgggttgccagcatcggcagagccggcagc
acctactacagcgattctgtgaagggcagattcaccatcagccgggacaacgtgcggaacatcctgtacctgcagat
gagcagcctgcggagcgaggataccgccatgtactactgtgccagaggacccatctacaacgactacgacgagttcg
cctattggggccagggcacactggttacagtttctgctggtggcggaggatctggcggaggtggaagcggcggaggc
ggatccaatatcatgatgacacagagcccgagcagcctggctgtgtctgctggcgagaaagtgaccatgtcctgcaa
gagcagccagagcgtgctgtactccagcaaccagaagaactacctggcctggtatcagcagaagcccggccagtctc
ctaagctgctgatctactgggccagcaccagagaaagcggcgtgcccgatagattcacaggcagcggcagcggaacc
gacttcaccctgacaatcagctctgtgcaggccgaagatctggccgtgtactattgccaccagtacctgtccagcct
gacctttggcgccggaacaaagctggaactgaagacaacaacccctgcccccagacctcctaccccagcccctacaa
ttgccagccagcctctgagcctgaggcccgaggcttgtagacctgctgctggcggagccgtgcacaccagaggactg
gatttcgcctgcgacatctacatctgggcgcccttggccgggacttgtggggtccttctcctgtcactggttatcac
cctttactgcaggagtaagaggagcaggctcctgcacagtgactacatgaacatgactcctagaagacctgggccta
ccagaaagcattaccagccctatgccccaccacgcgacttcgcagcctatcgctccagagtgaagttcagcaggagc
gcagacgcccccgcgtacaagcagggccagaaccagctctataacgagctcaatctaggacgaagagaggagtacga
tgttttggacaagagacgtggccgggaccctgagatggggggaaagccgagaaggaagaaccctcaggaaggcctgt
tcaatgaactgcagaaagataagatggcggaggccttcagtgagattgggatgaaaggcgagcgccggaggggcaag
gggcacgatggccttttccagggtctcagtacagccaccaaggacaccttcgacgcccttcacatgcaggccctgcc
ccctcgctgataagtttaaactgccagaacatttctctggcctaactggccggtaccggcttcattttttccattta
ctgcagaggcttcattttttccatttactgcagaggcttcattttttccatttactgcagaactagttaggcgtgta
cggtgggaggcctatataagcagagctcgtttagtgaaccgtcagatcgcctggagacgccatccacgctgttttga
cctccatagaagacaccgggaccgatccagcctcgagagacccaatgctagccaccatggccttaccagtgaccgcc
ttgctcctgccgctggccttgctgctccacgccgccaggccgtacttcggcaagctggaaagcaagctgagcgtgat
ccggaacctgaacgaccaggtgctgttcatcgatcagggcaacagacccctgttcgaggacatgaccgacagcgact
gcagagacaacgcccctcggaccatcttcatcatcagcatgtacaaggacagccagcctagaggcatggccgtgacc
atctctgtgaagtgcgagaagatcagcaccctgagctgcgagaacaagatcatcagcttcaaagagatgaacccgcc
ggacaacatcaaggacaccaagagcgacatcatattcttccagcggagcgtgcccggccacgacaacaagatgcagt
ttgagagcagcagctacgagggctacttcctggcctgcgagaaagagcgggacctgttcaagctgatcctgaagaaa
gaggacgaactgggcgaccgcagcatcatgttcaccgtgcagaacgaggactgataa
hu20A10-8-28-3z1XX-Foxp3-NFAT-IL-18
(DNA)
(SEQ ID NO: 1666)
atggccttaccagtgaccgccttgctcctgccgctggccttgctgctccacgccgccaggccggaggtgcagctggt
tgaatctggcggcggacttgtgaagcctggcggatctctgagactgagctgtgccgccagcggcttcacctttagca
catacgccatgagctgggtccgacaggcccctggaaaaggccttgaatgggttgcctctatcggcagagccggcagc
acctactacagcgattctgtgaagggcagattcaccatcagccgggacaacgccaagaacagcctgtacctgcagat
gaactccctgagagccgaggacaccgccgtgtactattgtgccagaggacccatctacaacgactacgacgagttcg
cctattggggccagggcacactggtcacagtcagctctggcggtggcggaagcggaggcggtggctccggtggcgga
ggcagcgacattgtgctgacccagtctccagcctccttggccgtgtctccaggacagagggccaccatcacctgcaa
gagcagccagagcgtgctgtactccagcaaccagaagaactacctggcctggtatcagcagaaaccaggacaacctc
ctaaactcctgatttactgggccagcaccagagaaagcggggtcccagccaggttcagcggcagtgggtctgggacc
gatttcaccctcacaattaatcctgtggaagctaatgatactgcaaattattactgtcaccagtacctgagcagcct
gaccttcggcggagggaccaaggtggagatcaaacgaacaacaacccctgcccccagacctcctaccccagccccta
caattgccagccagcctctgagcctgaggcccgaggcttgtagacctgctgctggcggagccgtgcacaccagagga
ctggatttcgcctgcgacatctacatctgggcgcccttggccgggacttgtggggtccttctcctgtcactggttat
caccctttactgcaggagtaagaggagcaggctcctgcacagtgactacatgaacatgactcctagaagacctgggc
ctaccagaaagcattaccagccctatgccccaccacgcgacttcgcagcctatcgctccagagtgaagttcagcagg
agcgcagacgcccccgcgtacaagcagggccagaaccagctctataacgagctcaatctaggacgaagagaggagta
cgatgttttggacaagagacgtggccgggaccctgagatggggggaaagccgagaaggaagaaccctcaggaaggcc
tgttcaatgaactgcagaaagataagatggcggaggccttcagtgagattgggatgaaaggcgagcgccggaggggc
aaggggcacgatggccttttccagggtctcagtacagccaccaaggacaccttcgacgcccttcacatgcaggccct
gccccctcgctgataagtttaaactgccagaacatttctctggcctaactggccggtaccggcttcattttttccat
ttactgcagaggcttcattttttccatttactgcagaggcttcattttttccatttactgcagaactagttaggcgt
gtacggtgggaggcctatataagcagagctcgtttagtgaaccgtcagatcgcctggagacgccatccacgctgttt
tgacctccatagaagacaccgggaccgatccagcctcgagagacccaatgctagccaccatggccttaccagtgacc
gccttgctcctgccgctggccttgctgctccacgccgccaggccgtacttcggcaagctggaaagcaagctgagcgt
gatccggaacctgaacgaccaggtgctgttcatcgatcagggcaacagacccctgttcgaggacatgaccgacagcg
actgcagagacaacgcccctcggaccatcttcatcatcagcatgtacaaggacagccagcctagaggcatggccgtg
accatctctgtgaagtgcgagaagatcagcaccctgagctgcgagaacaagatcatcagcttcaaagagatgaaccc
gccggacaacatcaaggacaccaagagcgacatcatattcttccagcggagcgtgcccggccacgacaacaagatgc
agtttgagagcagcagctacgagggctacttcctggcctgcgagaaagagcgggacctgttcaagctgatcctgaag
aaagaggacgaactgggcgaccgcagcatcatgttcaccgtgcagaacgaggactgataa
25E6
mu25E6-8-4-1EE-3z-Foxp3-NFAT-IL-18
(DNA)
(SEQ ID NO: 1667)
atggccttaccagtgaccgccttgctcctgccgctggccttgctgctccacgccgccaggccggaggtgcagctggt
ggagtctgggggagacttagtgaagcctggagggtccctgaaactctcctgtgcagcctctggtttcactttcagta
gttatggaatgtcttgggttcgccagactccagacaagaggctggagtgggtcgcaaccattagtaatggtggtaga
cacaccttctatccagacagtgtgaaggggcgattcaccatctccagagacaatgccaagaacaccctgtatctgca
aatgagcagtctgaagtctgaggacacagccatgtatttatgtgtaagacagactgggacggagggctggtttgctt
actggggccaagggactctggtcactgtctctgcaggtggcggaggatctggcggaggtggaagcggcggaggcgga
tccgatgttgtgatgacccagactccactcactttgtcggttaccattggacaaccagcctccatctcttgcaagtc
aagtcagagcctcttagatagtgatggaaagacatatttgaattggttgttacagaggccaggccagtctccaaagc
gcctaatctatctggtgtctaaactggactctggagtccctgacaggttcactggcagtggatcagggacagatttc
acactgaaaatcagcagagtggaggctgaggatttgggagtttattattgctggcaaggtacacattttcctcagac
gttcggtggaggcaccaagctggaaatcaaaacaacaacccctgcccccagacctcctaccccagcccctacaattg
ccagccagcctctgagcctgaggcccgaggcttgtagacctgctgctggcggagccgtgcacaccagaggactggat
ttcgcctgcgacatctacatctgggcgcccttggccgggacttgtggggtccttctcctgtcactggttatcaccct
ttactgcaaacggggcagaaagaaactcctgtatatattcaaacaaccatttatgagaccagtacaaactactcaag
aggaagatggctgtagctgccgatttccagaagaagaagaaggaggatgtgaactgagagtgaagttcagcaggagc
gcagacgcccccgcgtacaagcagggccagaaccagctctataacgagctcaatctaggacgaagagaggagtacga
tgttttggacaagagacgtggccgggaccctgagatggggggaaagccgagaaggaagaaccctcaggaaggcctgt
acaatgaactgcagaaagataagatggcggaggcctacagtgagattgggatgaaaggcgagcgccggaggggcaag
gggcacgatggcctttaccagggtctcagtacagccaccaaggacacctacgacgcccttcacatgcaggccctgcc
ccctcgctgataagtttaaactgccagaacatttctctggcctaactggccggtaccggcttcattttttccattta
ctgcagaggcttcattttttccatttactgcagaggcttcattttttccatttactgcagaactagttaggcgtgta
cggtgggaggcctatataagcagagctcgtttagtgaaccgtcagatcgcctggagacgccatccacgctgttttga
cctccatagaagacaccgggaccgatccagcctcgagagacccaatgctagccaccatggccttaccagtgaccgcc
ttgctcctgccgctggccttgctgctccacgccgccaggccgtacttcggcaagctggaaagcaagctgagcgtgat
ccggaacctgaacgaccaggtgctgttcatcgatcagggcaacagacccctgttcgaggacatgaccgacagcgact
gcagagacaacgcccctcggaccatcttcatcatcagcatgtacaaggacagccagcctagaggcatggccgtgacc
atctctgtgaagtgcgagaagatcagcaccctgagctgcgagaacaagatcatcagcttcaaagagatgaacccgcc
ggacaacatcaaggacaccaagagcgacatcatattcttccagcggagcgtgcccggccacgacaacaagatgcagt
ttgagagcagcagctacgagggctacttcctggcctgcgagaaagagcgggacctgttcaagctgatcctgaagaaa
gaggacgaactgggcgaccgcagcatcatgttcaccgtgcagaacgaggactgataa
hu25E6-8-4-1EE-3z-Foxp3-NFAT-IL-18
(DNA)
(SEQ ID NO: 1668)
atggccttaccagtgaccgccttgctcctgccgctggccttgctgctccacgccgccaggccggaggtgcagctggt
ggaatctggcggaggactggtcaagcctggaggcagcctgagactgagctgcgccgccagcggcttcacattcagca
gctacggcatgagctgggtgcggcaggcccctggcaagggcctggaatgggtcagcaccatcagcaacggcggaaga
cacaccttctaccccgacagcgtgaagggcagattcaccatctcaagagataacgccaagaacagcctgtacctgca
gatgaacagcctgcgggccgaggacaccgccgtgtactactgcgccagacagaccggcacagagggctggttcgcct
actggggccagggcaccctggtgaccgtgtccagcggcggtggcggaagcggaggcggtggctccggtggcggaggc
agogacatcgtgatgacccagacccctctgtctctgagcgtgacccctggccagcctgccagcatctcttgtaaaag
cagccagagoctgctggacagcgacggcaagacctacctgaactggtacctgcagaagcccggccaaagccctcagc
tgotgatctacctggtgtccaagctggatagcggtgttcctgatagattcagcggatctggcagcggcaccgacttc
accctgaagatcagcagagtggaagccgaggacgtgggcgtgtactactgotggcagggcacacacttcccccagac
attoggccagggcaccaaggtggaaatcaagacaacaacccctgcccccagacctcctaccccagcccctacaattg
ccagccagoctctgagcctgaggcccgaggcttgtagacctgctgctggcggagccgtgcacaccagaggactggat
ttogoctgcgacatctacatctgggcgcccttggccgggacttgtggggtccttctcctgtcactggttatcaccct
ttactgoaaacggggcagaaagaaactcctgtatatattcaaacaaccatttatgagaccagtacaaactactcaag
aggaagatggctgtagotgccgatttccagaagaagaagaaggaggatgtgaactgagagtgaagttcagcaggagc
gcagacgcccccgcgtacaagcagggccagaaccagotctataacgagctcaatctaggacgaagagaggagtacga
tgttttggacaagagacgtggcogggaccctgagatggggggaaagccgagaaggaagaaccctcaggaaggcctgt
acaatgaactgcagaaagataagatggoggaggcctacagtgagattgggatgaaaggcgagcgccggaggggcaag
gggcacgatggcctttaccagggtctcagtacagccaccaaggacacctacgacgcccttcacatgcaggccctgcc
ccctogotgataagtttaaactgccagaacatttctctggcctaactggccggtaccggcttcattttttccattta
ctgcagaggcttcattttttccatttactgcagaggcttcattttttccatttactgcagaactagttaggcgtgta
oggtgggaggcctatataagcagagctcgtttagtgaaccgtcagatcgcctggagacgccatccacgctgttttga
cctccatagaagacaccgggaccgatccagcctcgagagacccaatgctagccaccatggccttaccagtgaccgcc
ttgotcctgccgctggccttgctgctccacgccgccaggccgtacttcggcaagctggaaagcaagctgagcgtgat
coggaacctgaacgaccaggtgctgttcatcgatcagggcaacagacccctgttcgaggacatgaccgacagcgact
gcagagacaacgcccctoggaccatcttcatcatcagcatgtacaaggacagccagcctagaggcatggccgtgacc
atctctgtgaagtgcgagaagatcagcaccctgagctgcgagaacaagatcatcagcttcaaagagatgaacccgcc
ggacaacatcaaggacaccaagagogacatcatattcttccagcggagcgtgcccggccacgacaacaagatgcagt
ttgagagcagcagotacgagggctacttcctggcctgcgagaaagagcgggacctgttcaagctgatcctgaagaaa
gaggacgaactgggcgaccgcagcatcatgttcaccgtgcagaacgaggactgataa
mu25E6-8-28-3z-Foxp3-NFAT-IL-18
(DNA)
(SEQ ID NO: 1669)
atggccttaccagtgaccgccttgctcctgccgctggccttgctgctccacgccgccaggccggaggtgcagctggt
ggagtctgggggagacttagtgaagcctggagggtccctgaaactctcctgtgcagcctctggtttcactttcagta
gttatggaatgtcttgggttcgccagactccagacaagaggctggagtgggtcgcaaccattagtaatggtggtaga
cacaccttctatccagacagtgtgaaggggcgattcaccatctccagagacaatgccaagaacaccctgtatctgca
aatgagcagtctgaagtctgaggacacagccatgtatttatgtgtaagacagactgggacggagggctggtttgctt
actggggccaagggactctggtcactgtctctgcaggtggcggaggatctggcggaggtggaagcggcggaggcgga
tccgatgttgtgatgacccagactccactcactttgtcggttaccattggacaaccagcctccatctcttgcaagtc
aagtcagagcctcttagatagtgatggaaagacatatttgaattggttgttacagaggccaggccagtctccaaagc
gcctaatctatctggtgtctaaactggactctggagtccctgacaggttcactggcagtggatcagggacagatttc
acactgaaaatcagcagagtggaggctgaggatttgggagtttattattgctggcaaggtacacattttcctcagac
gttcggtggaggcaccaagctggaaatcaaaacaacaacccctgcccccagacctcctaccccagcccctacaattg
ccagccagcctctgagcctgaggcccgaggcttgtagacctgctgctggcggagccgtgcacaccagaggactggat
ttcgcctgcgacatctacatctgggcgcccttggccgggacttgtggggtccttctcctgtcactggttatcaccct
ttactgcaggagtaagaggagcaggctcctgcacagtgactacatgaacatgactcctagaagacctgggcctacca
gaaagcattaccagccctatgccccaccacgcgacttcgcagcctatcgctccagagtgaagttcagcaggagcgca
gacgcccccgcgtacaagcagggccagaaccagctctataacgagctcaatctaggacgaagagaggagtacgatgt
tttggacaagagacgtggccgggaccctgagatggggggaaagccgagaaggaagaaccctcaggaaggcctgtaca
atgaactgcagaaagataagatggcggaggcctacagtgagattgggatgaaaggcgagcgccggaggggcaagggg
cacgatggcctttaccagggtctcagtacagccaccaaggacacctacgacgcccttcacatgcaggccctgccccc
tcgctgataagtttaaactgccagaacatttctctggcctaactggccggtaccggcttcattttttccatttactg
cagaggcttcattttttccatttactgcagaggcttcattttttccatttactgcagaactagttaggcgtgtacgg
tgggaggcctatataagcagagctcgtttagtgaaccgtcagatcgcctggagacgccatccacgctgttttgacct
ccatagaagacaccgggaccgatccagcctcgagagacccaatgctagccaccatggccttaccagtgaccgccttg
ctcctgccgctggccttgctgctccacgccgccaggccgtacttcggcaagctggaaagcaagctgagcgtgatccg
gaacctgaacgaccaggtgctgttcatcgatcagggcaacagacccctgttcgaggacatgaccgacagcgactgca
gagacaacgcccctcggaccatcttcatcatcagcatgtacaaggacagccagcctagaggcatggccgtgaccatc
tctgtgaagtgcgagaagatcagcaccctgagctgcgagaacaagatcatcagcttcaaagagatgaacccgccgga
caacatcaaggacaccaagagcgacatcatattcttccagcggagcgtgcccggccacgacaacaagatgcagtttg
agagcagcagctacgagggctacttcctggcctgcgagaaagagcgggacctgttcaagctgatcctgaagaaagag
gacgaactgggcgaccgcagcatcatgttcaccgtgcagaacgaggactgataa
hu25E6-8-28-3z-Foxp3-NFAT-IL-18
(DNA)
(SEQ ID NO: 1670)
atggccttaccagtgaccgocttgctcctgccgctggccttgctgctccacgccgccaggccggaggtgcagctggt
ggaatctggcggaggactggtcaagcctggaggcagcctgagactgagctgcgccgccagcggcttcacattcagca
gotacggcatgagctgggtgcggcaggcccctggcaagggcctggaatgggtcagcaccatcagcaacggcggaaga
cacaccttctaccccgacagcgtgaagggcagattcaccatctcaagagataacgccaagaacagcctgtacctgca
gatgaacagoctgcgggccgaggacaccgccgtgtactactgcgccagacagaccggcacagagggctggttcgcct
actggggccagggcaccctggtgaccgtgtccagcggcggtggcggaagcggaggcggtggctccggtggcggaggc
agogacatcgtgatgacccagacccctctgtctctgagcgtgacccctggccagcctgccagcatctcttgtaaaag
cagccagagoctgctggacagcgacggcaagacctacctgaactggtacctgcagaagcccggccaaagccctcagc
tgotgatctacctggtgtccaagctggatagcggtgttcctgatagattcagcggatctggcagcggcaccgacttc
accctgaagatcagcagagtggaagccgaggacgtgggcgtgtactactgotggcagggcacacacttcccccagac
attoggccagggcaccaaggtggaaatcaagacaacaacccctgcccccagacctcctaccccagcccctacaattg
ccagccagoctctgagcctgaggcccgaggcttgtagacctgctgctggcggagccgtgcacaccagaggactggat
ttogoctgcgacatctacatctgggcgcccttggccgggacttgtggggtccttctcctgtcactggttatcaccct
ttactgcaggagtaagaggagcaggctcctgcacagtgactacatgaacatgactcctagaagacctgggcctacca
gaaagcattaccagocctatgccccaccacgcgacttcgcagcctatcgctccagagtgaagttcagcaggagcgca
gacgcccccgcgtacaagcagggccagaaccagotctataacgagctcaatctaggacgaagagaggagtacgatgt
tttggacaagagacgtggcogggaccctgagatggggggaaagccgagaaggaagaaccctcaggaaggcctgtaca
atgaactgcagaaagataagatggoggaggcctacagtgagattgggatgaaaggcgagcgccggaggggcaagggg
cacgatggcctttaccagggtctcagtacagccaccaaggacacctacgacgcccttcacatgcaggccctgccccc
togotgataagtttaaactgccagaacatttctctggcctaactggccggtaccggcttcattttttccatttactg
cagaggottcattttttccatttactgcagaggcttcattttttccatttactgcagaactagttaggcgtgtacgg
tgggaggcctatataagcagagotcgtttagtgaaccgtcagatcgcctggagacgccatccacgctgttttgacct
ccatagaagacacogggaccgatccagcctcgagagacccaatgctagccaccatggccttaccagtgaccgccttg
ctcctgccgctggccttgctgctccacgccgccaggccgtacttcggcaagctggaaagcaagctgagcgtgatccg
gaacctgaacgaccaggtgotgttcatcgatcagggcaacagacccctgttcgaggacatgaccgacagcgactgca
gagacaacgcccctoggaccatcttcatcatcagcatgtacaaggacagccagcctagaggcatggccgtgaccatc
tctgtgaagtgcgagaagatcagcaccctgagctgcgagaacaagatcatcagcttcaaagagatgaacccgccgga
caacatcaaggacaccaagagogacatcatattcttccagcggagcgtgcccggccacgacaacaagatgcagtttg
agagcagcagotacgagggctacttcctggcctgcgagaaagagcgggacctgttcaagctgatcctgaagaaagag
gacgaactgggcgaccgcagcatcatgttcaccgtgcagaacgaggactgataa
mu25E6-8-4-11313-3z1XX-Foxp3-NFAT-IL-18
(DNA)
(SEQ ID NO: 1671)
atggccttaccagtgaccgccttgctcctgccgctggccttgctgctccacgccgccaggccggaggtgcagctggt
ggagtctgggggagacttagtgaagcctggagggtccctgaaactctcctgtgcagcctctggtttcactttcagta
gttatggaatgtcttgggttcgccagactccagacaagaggctggagtgggtcgcaaccattagtaatggtggtaga
cacaccttctatccagacagtgtgaaggggcgattcaccatctccagagacaatgccaagaacaccctgtatctgca
aatgagcagtctgaagtctgaggacacagccatgtatttatgtgtaagacagactgggacggagggctggtttgctt
actggggccaagggactctggtcactgtctctgcaggtggcggaggatctggcggaggtggaagcggcggaggcgga
tccgatgttgtgatgacccagactccactcactttgtcggttaccattggacaaccagcctccatctcttgcaagtc
aagtcagagcctcttagatagtgatggaaagacatatttgaattggttgttacagaggccaggccagtctccaaagc
gcctaatctatctggtgtctaaactggactctggagtccctgacaggttcactggcagtggatcagggacagatttc
acactgaaaatcagcagagtggaggctgaggatttgggagtttattattgctggcaaggtacacattttcctcagac
gttcggtggaggcaccaagctggaaatcaaaacaacaacccctgcccccagacctcctaccccagcccctacaattg
ccagccagcctctgagcctgaggcccgaggcttgtagacctgctgctggcggagccgtgcacaccagaggactggat
ttcgcctgcgacatctacatctgggcgcccttggccgggacttgtggggtccttctcctgtcactggttatcaccct
ttactgcaaacggggcagaaagaaactcctgtatatattcaaacaaccatttatgagaccagtacaaactactcaag
aggaagatggctgtagctgccgatttccagaagaagaagaaggaggatgtgaactgagagtgaagttcagcaggagc
gcagacgcccccgcgtacaagcagggccagaaccagctctataacgagctcaatctaggacgaagagaggagtacga
tgttttggacaagagacgtggccgggaccctgagatggggggaaagccgagaaggaagaaccctcaggaaggcctgt
tcaatgaactgcagaaagataagatggcggaggccttcagtgagattgggatgaaaggcgagcgccggaggggcaag
gggcacgatggccttttccagggtctcagtacagccaccaaggacaccttcgacgcccttcacatgcaggccctgcc
ccctcgctgataagtttaaactgccagaacatttctctggcctaactggccggtaccggcttcattttttccattta
ctgcagaggcttcattttttccatttactgcagaggcttcattttttccatttactgcagaactagttaggcgtgta
oggtgggaggcctatataagcagagctcgtttagtgaaccgtcagatcgcctggagacgccatccacgctgttttga
cctccatagaagacaccgggaccgatccagcctcgagagacccaatgctagccaccatggccttaccagtgaccgcc
ttgotcctgccgctggccttgctgctccacgccgccaggccgtacttcggcaagctggaaagcaagctgagcgtgat
coggaacctgaacgaccaggtgctgttcatcgatcagggcaacagacccctgttcgaggacatgaccgacagcgact
gcagagacaacgcccctoggaccatcttcatcatcagcatgtacaaggacagccagcctagaggcatggccgtgacc
atctctgtgaagtgcgagaagatcagcaccctgagctgcgagaacaagatcatcagcttcaaagagatgaacccgcc
ggacaacatcaaggacaccaagagogacatcatattcttccagcggagcgtgcccggccacgacaacaagatgcagt
ttgagagcagcagotacgagggctacttcctggcctgcgagaaagagcgggacctgttcaagctgatcctgaagaaa
gaggacgaactgggcgaccgcagcatcatgttcaccgtgcagaacgaggactgataa
hu25E6-8-4-11313-3z1XX-Foxp3-NFAT-IL-18
(DNA)
(SEQ ID NO: 1672)
atggccttaccagtgaccgccttgctcctgccgctggccttgctgctccacgccgccaggccggaggtgcagctggt
ggaatctggcggaggactggtcaagcctggaggcagcctgagactgagctgcgccgccagcggcttcacattcagca
gctacggcatgagctgggtgcggcaggcccctggcaagggcctggaatgggtcagcaccatcagcaacggcggaaga
cacaccttctaccccgacagcgtgaagggcagattcaccatctcaagagataacgccaagaacagcctgtacctgca
gatgaacagcctgcgggccgaggacaccgccgtgtactactgcgccagacagaccggcacagagggctggttcgcct
actggggccagggcaccctggtgaccgtgtccagcggcggtggcggaagcggaggcggtggctccggtggcggaggc
agcgacatcgtgatgacccagacccctctgtctctgagcgtgacccctggccagcctgccagcatctcttgtaaaag
cagccagagcctgctggacagcgacggcaagacctacctgaactggtacctgcagaagcccggccaaagccctcagc
tgctgatctacctggtgtccaagctggatagcggtgttcctgatagattcagcggatctggcagcggcaccgacttc
accctgaagatcagcagagtggaagccgaggacgtgggcgtgtactactgctggcagggcacacacttcccccagac
attcggccagggcaccaaggtggaaatcaagacaacaacccctgcccccagacctcctaccccagcccctacaattg
ccagccagcctctgagcctgaggcccgaggcttgtagacctgctgctggcggagccgtgcacaccagaggactggat
ttcgcctgcgacatctacatctgggcgcccttggccgggacttgtggggtccttctcctgtcactggttatcaccct
ttactgcaaacggggcagaaagaaactcctgtatatattcaaacaaccatttatgagaccagtacaaactactcaag
aggaagatggctgtagctgccgatttccagaagaagaagaaggaggatgtgaactgagagtgaagttcagcaggagc
gcagacgcccccgcgtacaagcagggccagaaccagctctataacgagctcaatctaggacgaagagaggagtacga
tgttttggacaagagacgtggccgggaccctgagatggggggaaagccgagaaggaagaaccctcaggaaggcctgt
tcaatgaactgcagaaagataagatggcggaggccttcagtgagattgggatgaaaggcgagcgccggaggggcaag
gggcacgatggccttttccagggtctcagtacagccaccaaggacaccttcgacgcccttcacatgcaggccctgcc
ccctcgctgataagtttaaactgccagaacatttctctggcctaactggccggtaccggcttcattttttccattta
ctgcagaggcttcattttttccatttactgcagaggcttcattttttccatttactgcagaactagttaggcgtgta
cggtgggaggcctatataagcagagctcgtttagtgaaccgtcagatcgcctggagacgccatccacgctgttttga
cctccatagaagacaccgggaccgatccagcctcgagagacccaatgctagccaccatggccttaccagtgaccgcc
ttgctcctgccgctggccttgctgctccacgccgccaggccgtacttcggcaagctggaaagcaagctgagcgtgat
ccggaacctgaacgaccaggtgctgttcatcgatcagggcaacagacccctgttcgaggacatgaccgacagcgact
gcagagacaacgcccctcggaccatcttcatcatcagcatgtacaaggacagccagcctagaggcatggccgtgacc
atctctgtgaagtgcgagaagatcagcaccctgagctgcgagaacaagatcatcagcttcaaagagatgaacccgcc
ggacaacatcaaggacaccaagagcgacatcatattcttccagcggagcgtgcccggccacgacaacaagatgcagt
ttgagagcagcagctacgagggctacttcctggcctgcgagaaagagcgggacctgttcaagctgatcctgaagaaa
gaggacgaactgggcgaccgcagcatcatgttcaccgtgcagaacgaggactgataa
mu25E6-8-28-3z1XX-Foxp3-NFAT-IL-18
(DNA)
(SEQ ID NO: 1673)
atggccttaccagtgaccgccttgctcctgccgctggccttgctgctccacgccgccaggccggaggtgcagctggt
ggagtctgggggagacttagtgaagcctggagggtccctgaaactctcctgtgcagcctctggtttcactttcagta
gttatggaatgtcttgggttcgccagactccagacaagaggctggagtgggtcgcaaccattagtaatggtggtaga
cacaccttctatccagacagtgtgaaggggcgattcaccatctccagagacaatgccaagaacaccctgtatctgca
aatgagcagtctgaagtctgaggacacagccatgtatttatgtgtaagacagactgggacggagggctggtttgctt
actggggccaagggactctggtcactgtctctgcaggtggcggaggatctggcggaggtggaagcggcggaggcgga
tccgatgttgtgatgacccagactccactcactttgtcggttaccattggacaaccagcctccatctcttgcaagtc
aagtcagagcctcttagatagtgatggaaagacatatttgaattggttgttacagaggccaggccagtctccaaagc
gcctaatctatctggtgtctaaactggactctggagtccctgacaggttcactggcagtggatcagggacagatttc
acactgaaaatcagcagagtggaggctgaggatttgggagtttattattgctggcaaggtacacattttcctcagac
gttcggtggaggcaccaagctggaaatcaaaacaacaacccctgcccccagacctcctaccccagcccctacaattg
ccagccagcctctgagcctgaggcccgaggcttgtagacctgctgctggcggagccgtgcacaccagaggactggat
ttogoctgcgacatctacatctgggcgcccttggccgggacttgtggggtccttctcctgtcactggttatcaccct
ttactgcaggagtaagaggagcaggctcctgcacagtgactacatgaacatgactcctagaagacctgggcctacca
gaaagcattaccagocctatgccccaccacgcgacttcgcagcctatcgctccagagtgaagttcagcaggagcgca
gacgcccccgcgtacaagcagggccagaaccagotctataacgagctcaatctaggacgaagagaggagtacgatgt
tttggacaagagacgtggcogggaccctgagatggggggaaagccgagaaggaagaaccctcaggaaggcctgttca
atgaactgcagaaagataagatggoggaggccttcagtgagattgggatgaaaggcgagcgccggaggggcaagggg
cacgatggccttttccagggtctcagtacagccaccaaggacaccttcgacgcccttcacatgcaggccctgccccc
togotgataagtttaaactgccagaacatttctctggcctaactggccggtaccggcttcattttttccatttactg
cagaggottcattttttccatttactgcagaggcttcattttttccatttactgcagaactagttaggcgtgtacgg
tgggaggcctatataagcagagotcgtttagtgaaccgtcagatcgcctggagacgccatccacgctgttttgacct
ccatagaagacacogggaccgatccagcctcgagagacccaatgctagccaccatggccttaccagtgaccgccttg
ctcctgccgctggccttgctgctccacgccgccaggccgtacttcggcaagctggaaagcaagctgagcgtgatccg
gaacctgaacgaccaggtgotgttcatcgatcagggcaacagacccctgttcgaggacatgaccgacagcgactgca
gagacaacgcccctoggaccatcttcatcatcagcatgtacaaggacagccagcctagaggcatggccgtgaccatc
tctgtgaagtgcgagaagatcagcaccctgagctgcgagaacaagatcatcagcttcaaagagatgaacccgccgga
caacatcaaggacaccaagagogacatcatattcttccagcggagcgtgcccggccacgacaacaagatgcagtttg
agagcagcagotacgagggctacttcctggcctgcgagaaagagcgggacctgttcaagctgatcctgaagaaagag
gacgaactgggcgaccgcagcatcatgttcaccgtgcagaacgaggactgataa
hu25E6-8-28-3z1XX-Foxp3-NFAT-IL-18
(DNA)
(SEQ ID NO: 1674)
atggccttaccagtgaccgccttgctcctgccgctggccttgctgctccacgccgccaggccggaggtgcagctggt
ggaatctggcggaggactggtcaagcctggaggcagcctgagactgagctgcgccgccagcggcttcacattcagca
gctacggcatgagctgggtgcggcaggcccctggcaagggcctggaatgggtcagcaccatcagcaacggcggaaga
cacaccttctaccccgacagcgtgaagggcagattcaccatctcaagagataacgccaagaacagcctgtacctgca
gatgaacagcctgcgggccgaggacaccgccgtgtactactgcgccagacagaccggcacagagggctggttcgcct
actggggccagggcaccctggtgaccgtgtccagcggcggtggcggaagcggaggcggtggctccggtggcggaggc
agcgacatcgtgatgacccagacccctctgtctctgagcgtgacccctggccagcctgccagcatctcttgtaaaag
cagccagagcctgctggacagcgacggcaagacctacctgaactggtacctgcagaagcccggccaaagccctcagc
tgctgatctacctggtgtccaagctggatagcggtgttcctgatagattcagcggatctggcagcggcaccgacttc
accctgaagatcagcagagtggaagccgaggacgtgggcgtgtactactgctggcagggcacacacttcccccagac
attcggccagggcaccaaggtggaaatcaagacaacaacccctgcccccagacctcctaccccagcccctacaattg
ccagccagcctctgagcctgaggcccgaggcttgtagacctgctgctggcggagccgtgcacaccagaggactggat
ttcgcctgcgacatctacatctgggcgcccttggccgggacttgtggggtccttctcctgtcactggttatcaccct
ttactgcaggagtaagaggagcaggctcctgcacagtgactacatgaacatgactcctagaagacctgggcctacca
gaaagcattaccagccctatgccccaccacgcgacttcgcagcctatcgctccagagtgaagttcagcaggagcgca
gacgcccccgcgtacaagcagggccagaaccagctctataacgagctcaatctaggacgaagagaggagtacgatgt
tttggacaagagacgtggccgggaccctgagatggggggaaagccgagaaggaagaaccctcaggaaggcctgttca
atgaactgcagaaagataagatggcggaggccttcagtgagattgggatgaaaggcgagcgccggaggggcaagggg
cacgatggccttttccagggtctcagtacagccaccaaggacaccttcgacgcccttcacatgcaggccctgccccc
tcgctgataagtttaaactgccagaacatttctctggcctaactggccggtaccggcttcattttttccatttactg
cagaggcttcattttttccatttactgcagaggcttcattttttccatttactgcagaactagttaggcgtgtacgg
tgggaggcctatataagcagagctcgtttagtgaaccgtcagatcgcctggagacgccatccacgctgttttgacct
ccatagaagacaccgggaccgatccagcctcgagagacccaatgctagccaccatggccttaccagtgaccgccttg
ctcctgccgctggccttgctgctccacgccgccaggccgtacttcggcaagctggaaagcaagctgagcgtgatccg
gaacctgaacgaccaggtgctgttcatcgatcagggcaacagacccctgttcgaggacatgaccgacagcgactgca
gagacaacgcccctcggaccatcttcatcatcagcatgtacaaggacagccagcctagaggcatggccgtgaccatc
tctgtgaagtgcgagaagatcagcaccctgagctgcgagaacaagatcatcagcttcaaagagatgaacccgccgga
caacatcaaggacaccaagagcgacatcatattcttccagcggagcgtgcccggccacgacaacaagatgcagtttg
agagcagcagctacgagggctacttcctggcctgcgagaaagagcgggacctgttcaagctgatcctgaagaaagag
gacgaactgggcgaccgcagcatcatgttcaccgtgcagaacgaggactgataa
Construct Name: pCDH MSCV h20A10-0 CAR 41BB
Construct backbone: pCDH CMV MCS (SBI)
Promoter MSCV
Leader sequence: Human CD8 alpha (1-63)
scFv Name: Humanized 20A10-0 (64-807)
Hinge region: Human CD8 alpha (808-942)
Transmembrane Domain: Human CD8 alpha (943-1014)
Costimulatory Domains: Human 41BB (101 -1140) and CD3 zeta (1141-1476
(SEQ ID NO: 1675)
atggccttaccagtgaccgccttgctcctgccgctggccttgctgctccacgccgccaggccggaggtgcagctggt
tgaatctggcggcggacttgtgaagcctggcggatctctgagactgagctgtgccgccagcggcttcacctttagca
catacgccatgagctgggtccgacaggcccctggaaaaggccttgaatgggttgcctctatcggcagagccggcagc
acctactacagcgattctgtgaagggcagattcaccatcagccgggacaacgccaagaacagcctgtacctgcagat
gaactccctgagagccgaggacaccgccgtgtactattgtgccagaggacccatctacaacgactacgacgagttcg
cctattggggccagggcacactggtcacagtcagctctggcggtggcggaagcggaggcggtggctccggtggcgga
ggcagcgacatcgtgatgacacagagccctgatagcctggccgtgtctctgggagagagagccaccatcaactgcaa
gagcagccagagcgtgctgtactccagcaaccagaagaactacctggcctggtatcagcagaagcccggccagcctc
ctaagctgctgatctactgggccagcaccagagaaagcggcgtgcccgatagattttctggcagcggctctggcacc
gacttcaccctgacaattagctccctgcaggccgaggatgtggccgtgtactactgtcaccagtacctgagcagcct
gacctttggcggcggaacaaaggtggaaatcaagcgaacaacaacccctgcccccagacctcctaccccagccccta
caattgccagccagcctctgagcctgaggcccgaggcttgtagacctgctgctggcggagccgtgcacaccagagga
ctggatttcgcctgcgacatctacatctgggcgcccttggccgggacttgtggggtccttctcctgtcactggttat
caccctttactgcaaacggggcagaaagaaactcctgtatatattcaaacaaccatttatgagaccagtacaaacta
ctcaagaggaagatggctgtagctgccgatttccagaagaagaagaaggaggatgtgaactgagagtgaagttcagc
aggagcgcagacgcccccgcgtacaagcagggccagaaccagctctataacgagctcaatctaggacgaagagagga
gtacgatgttttggacaagagacgtggccgggaccctgagatggggggaaagccgagaaggaagaaccctcaggaag
gcctgtacaatgaactgcagaaagataagatggcggaggcctacagtgagattgggatgaaaggcgagcgccggagg
ggcaaggggcacgatggcctttaccagggtctcagtacagccaccaaggacacctacgacgcccttcacatgcaggc
cctgccccctcgctgataa
CDB leader sequence
(SEQ ID NO: 1676)
ATGGCCTTACCAGTGACCGCCTTGCTCCTGCCGCTGGCCTTGCTGCTCCACGCCGCCAGGCCG
h20A10-0 scEV
Construct Name: pCDH MSCV h20A10-N CAR 41BB
Construct backbone: pCDH CMV MCS (SBI)
Promoter MScv
Leader sequence: Human CD8 alpha (1-63)
scFv Name: Humanized 20A10-N (64-807)
Hinge region: Human CD8 alpha (808-942)
Transmembrane Domain: Human CD8 alpha (943-1014)
Costimulatory Domains: Human 41BB (1015-1140) and CD3 zeta (1141-1476)
(SEQ ID NO: 1677)
GAGGTGCAGCTGGTTGAATCTGGCGGCGGACTTGTGAAGCCTGGCGGATCTCTGAGACTGAGCTGTGCCGCCAGCGG
CTTCACCTTTAGCACATACGCCATGAGCTGGGTCCGACAGGCCCCTGGAAAAGGCCTTGAATGGGTTGCCTCTATCG
GCAGAGCCGGCAGCACCTACTACAGCGATTCTGTGAAGGGCAGATTCACCATCAGCCGGGACAACGCCAAGAACAGC
CTGTACCTGCAGATGAACTCCCTGAGAGCCGAGGACACCGCCGTGTACTATTGTGCCAGAGGACCCATCTACAACGA
CTACGACGAGTTCGCCTATTGGGGCCAGGGCACACTGGTCACAGTCAGCTCTGGCGGTGGCGGAagcGGAGGCGGTG
GCtccGGTGGCGGAGGCagcGACATCGTGATGACACAGAGCCCTGATAGCCTGGCCGTGTCTCTGGGAGAGAGAGCC
ACCATCAACTGCAAGAGCAGCCAGAGCGTGCTGTACTCCAGCAACCAGAAGAACTACCTGGCCTGGTATCAGCAGAA
GCCCGGCCAGCCTCCTAAGCTGCTGATCTACTGGGCCAGCACCAGAGAAAGCGGCGTGCCCGATAGATTTTCTGGCA
GCGGCTCTGGCACCGACTTCACCCTGACAATTAGCTCCCTGCAGGCCGAGGATGTGGCCGTGTACTACTGTCACCAG
TACCTGAGCAGCCTGACCTTTGGCGGCGGAACAAAGGTGGAAATCAAGcga
CDB hinge region
(SEQ ID NO: 1678)
ACAACAACCCCTGCCCCCAGACCTCCTACCCCAGCCCCTACAATTGCCAGCCAGCCTCTGAGCCTGAGGCCCGAGGC
TTGTAGACCTGCTGCTGGCGGAGCCGTGCACACCAGAGGACTGGATTTCGCCTGCGAC
CD8 transmembrane domain
(SEQ ID NO: 1675)
ATCTACATCTGGGCGCCCTTGGCCGGGACTTGTGGGGTCCTTCTCCTGTCACTGGTTATCACCCTTTACTGC
41BB
(SEQ ID NO: 1676)
AAACGGGGCAGAAAGAAACTCCTGTATATATTCAAACAACCATTTATGAGACCAGTACAAACTACTCAAGAGGAAGA
TGGCTGTAGCTGCCGATTTCCAGAAGAAGAAGAAGGAGGATGTGAACTG
CD3
(SEQ ID NO: 1677)
AGAGTGAAGTTCAGCAGGAGCGCAGACGCCCCCGCGTACAAGCAGGGCCAGAACCAGCTCTATAACGAGCTCAATCT
AGGACGAAGAGAGGAGTACGATGTTTTGGACAAGAGACGTGGCCGGGACCCTGAGATGGGGGGAAAGCCGAGAAGGA
AGAACCCTCAGGAAGGCCTGTACAATGAACTGCAGAAAGATAAGATGGCGGAGGCCTACAGTGAGATTGGGATGAAA
GGCGAGCGCCGGAGGGGCAAGGGGCACGATGGCCTTTACCAGGGTCTCAGTACAGCCACCAAGGACACCTACGACGC
CCTTCACATGCAGGCCCTGCCCCCTCGCTGATAA
(SEQ ID NO: 1678)
ATGGCCTTACCAGTGACCGCCTTGCTCCTGCCGCTGGCCTTGCTGCTCCACGCCGCCAGGCCGCAGGTGCAGCTGGT
TGAATCTGGCGGCGGACTTGTGAAGCCTGGCGGATCTCTGAGACTGAGCTGTGCCGCCAGCGGCTTCACCTTTAGCA
CATACGCCATGAGCTGGATCAGACAGGCCCCTGGCAAAGGCCTGGAATGGGTGgcgTCTATTGGCAGAGCCGGCAGC
ACCTACTACAGCGACTCTGTGAAGGGCAGATTCACCATCAGCCGGGACAACGCCAAGAACAGCCTGTACCTGCAGAT
GAACTCCCTGAGAGCCGAGGACACCGCCGTGTACTATTGTGCCAGAGGACCCATCTACAACGACTACGACGAGTTCG
CCTATTGGGGCCAGGGCACACTGGTCACAGTTTCTAGCGGCGGTGGCGGAagcGGAGGCGGTGGCtccGGTGGCGGA
GGCagcGAAATTGTGCTGACACAGAGCCCCGCCACACTGTCACTTTCTCCAGGCGAAAGAGCCACACTGAGCTGCAA
GAGCAGCCAGAGCGTGCTGTACTCCAGCAACCAGAAGAACTACCTGGCCTGGTATCAGCAGAAGCCCGGCCAAGCTC
CTCGGCTGCTGATCTATTGGGCCAGCACAAGAGAGAGCGGCATCCCTGCCAGATTTTCTGGCAGCGGCTCTGGCACC
GATTTCACCCTGACCATAAGCAGCCTGGAACCTGAGGACTTCGCCGTGTATTACTGCCACCAGTACCTGAGCAGCCT
GACCTTTGGCGGAGGCACCAAGGTGGAAATCAAGCGGACAACAACCCCTGCCCCCAGACCTCCTACCCCAGCCCCTA
CAATTGCCAGCCAGCCTCTGAGCCTGAGGCCCGAGGCTTGTAGACCTGCTGCTGGCGGAGCCGTGCACACCAGAGGA
CTGGATTTCGCCTGCGACATCTACATCTGGGCGCCCTTGGCCGGGACTTGTGGGGTCCTTCTCCTGTCACTGGTTAT
CACCCTTTACTGCAAACGGGGCAGAAAGAAACTCCTGTATATATTCAAACAACCATTTATGAGACCAGTACAAACTA
CTCAAGAGGAAGATGGCTGTAGCTGCCGATTTCCAGAAGAAGAAGAAGGAGGATGTGAACTGAGAGTGAAGTTCAGC
AGGAGCGCAGACGCCCCCGCGTACAAGCAGGGCCAGAACCAGCTCTATAACGAGCTCAATCTAGGACGAAGAGAGGA
GTACGATGTTTTGGACAAGAGACGTGGCCGGGACCCTGAGATGGGGGGAAAGCCGAGAAGGAAGAACCCTCAGGAAG
GCCTGTACAATGAACTGCAGAAAGATAAGATGGCGGAGGCCTACAGTGAGATTGGGATGAAAGGCGAGCGCCGGAGG
GGCAAGGGGCACGATGGCCTTTACCAGGGTCTCAGTACAGCCACCAAGGACACCTACGACGCCCTTCACATGCAGGC
CCTGCCCCCTCGCTGATAA
CDB leader sequence
(SEQ ID NO: 1679)
ATGGCCTTACCAGTGACCGCCTTGCTCCTGCCGCTGGCCTTGCTGCTCCACGCCGCCAGGCCG
h20A10-N scEV
(SEQ ID NO: 1680)
CAGGTGCAGCTGGTTGAATCTGGCGGCGGACTTGTGAAGCCTGGCGGATCTCTGAGACTGAGCTGTGCCGCCAGCGG
CTTCACCTTTAGCACATACGCCATGAGCTGGATCAGACAGGCCCCTGGCAAAGGCCTGGAATGGGTGgcgTCTATTG
GCAGAGCCGGCAGCACCTACTACAGCGACTCTGTGAAGGGCAGATTCACCATCAGCCGGGACAACGCCAAGAACAGC
CTGTACCTGCAGATGAACTCCCTGAGAGCCGAGGACACCGCCGTGTACTATTGTGCCAGAGGACCCATCTACAACGA
CTACGACGAGTTCGCCTATTGGGGCCAGGGCACACTGGTCACAGTTTCTAGCGGCGGTGGCGGAagcGGAGGCGGTG
GCtccGGTGGCGGAGGCagcGAAATTGTGCTGACACAGAGCCCCGCCACACTGTCACTTTCTCCAGGCGAAAGAGCC
ACACTGAGCTGCAAGAGCAGCCAGAGCGTGCTGTACTCCAGCAACCAGAAGAACTACCTGGCCTGGTATCAGCAGAA
GCCCGGCCAAGCTCCTCGGCTGCTGATCTATTGGGCCAGCACAAGAGAGAGCGGCATCCCTGCCAGATTTTCTGGCA
GCGGCTCTGGCACCGATTTCACCCTGACCATAAGCAGCCTGGAACCTGAGGACTTCGCCGTGTATTACTGCCACCAG
TACCTGAGCAGCCTGACCTTTGGCGGAGGCACCAAGGTGGAAATCAAGCGG
CD8 hinge region
(SEQ ID NO: 1681)
ACAACAACCCCTGCCCCCAGACCTCCTACCCCAGCCCCTACAATTGCCAGCCAGCCTCTGAGCCTGAGGCCCGAGGC
TTGTAGACCTGCTGCTGGCGGAGCCGTGCACACCAGAGGACTGGATTTCGCCTGCGAC
CD8 transmembrane domain
(SEQ ID NO: 1682)
ATCTACATCTGGGCGCCCTTGGCCGGGACTTGTGGGGTCCTTCTCCTGTCACTGGTTATCACCCTTTACTGC
41BB
(SEQ ID NO: 1683)
AAACGGGGCAGAAAGAAACTCCTGTATATATTCAAACAACCATTTATGAGACCAGTACAAACTACTCAAGAGGAAGA
TGGCTGTAGCTGCCGATTTCCAGAAGAAGAAGAAGGAGGATGTGAACTG
CD3
(SEQ ID NO: 1684)
AGAGTGAAGTTCAGCAGGAGCGCAGACGCCCCCGCGTACAAGCAGGGCCAGAACCAGCTCTATAACGAGCTCAATCT
AGGACGAAGAGAGGAGTACGATGTTTTGGACAAGAGACGTGGCCGGGACCCTGAGATGGGGGGAAAGCCGAGAAGGA
AGAACCCTCAGGAAGGCCTGTACAATGAACTGCAGAAAGATAAGATGGCGGAGGCCTACAGTGAGATTGGGATGAAA
GGCGAGCGCCGGAGGGGCAAGGGGCACGATGGCCTTTACCAGGGTCTCAGTACAGCCACCAAGGACACCTACGACGC
CCTTCACATGCAGGCCCTGCCCCCTCGCTGATAA
Construct Name: pCDH MSCV h20A10-C2 CAR 41BB
Construct backbone: pCDH CMV MCS (SBI)
Promoter MSCV
Leader sequence: Human CD8 alpha (1-63)
scFv Name: Humanized 20A10-C2 (64-807
Hinge region: Human CD8 alpha (808-942)
Transmembrane Domain: Human CD8 alpha (943-1014)
Costimulatory Domains: Human 41BB (1015-1140) and CD3 zeta (1141-1476)
(SEQ ID NO: 1685)
ATGGCCTTACCAGTGACCGCCTTGCTCCTGCCGCTGGCCTTGCTGCTCCACGCCGCCAGGCCGGAGGTGCAGCTGGT
TGAATCTGGCGGCGGACTTGTGAAGCCTGGCGGATCTCTGAGACTGAGCTGTGCCGCCAGCGGCTTCACCTTTAGCA
CATACGCCATGAGCTGGGTCCGACAGGCCCCTGGAAAAGGCCTTGAATGGGTTGCCTCTATCGGCAGAGCCGGCAGC
ACCTACTACAGCGATTCTGTGAAGGGCAGATTCACCATCAGCCGGGACAACGCCAAGAACAGCCTGTACCTGCAGAT
GAACTCCCTGAGAGCCGAGGACACCGCCGTGTACTATTGTGCCAGAGGACCCATCTACAACGACTACGACGAGTTCG
CCTATTGGGGCCAGGGCACACTGGTCACAGTCAGCTCTGGCGGTGGCGGAagcGGAGGCGGTGGCtccGGTGGCGGA
GGCagcgacattgtgctgacccagtctccagcctccttggccgtgtctccaggacagagggccaccatcacctgcAA
GAGCAGCCAGAGCGTGCTGTACTCCAGCAACCAGAAGAACTACCTGGCCtggtatcagcagaaaccaggacaacctc
ctaaactcctgatttacTGGGCCAGCACCAGAGAAAGCggggtcccagccaggttcagcggcagtgggtctgggacc
gatttcaccctcacaattaatcctgtggaagctaatgatactgcaaattattactgtCACCAGTACCTGAGCAGCCT
GACCTTCGGCGGAGGGACCAAGGTGGAGATCAAACGAACAACAACCCCTGCCCCCAGACCTCCTACCCCAGCCCCTA
CAATTGCCAGCCAGCCTCTGAGCCTGAGGCCCGAGGCTTGTAGACCTGCTGCTGGCGGAGCCGTGCACACCAGAGGA
CTGGATTTCGCCTGCGACATCTACATCTGGGCGCCCTTGGCCGGGACTTGTGGGGTCCTTCTCCTGTCACTGGTTAT
CACCCTTTACTGCAAACGGGGCAGAAAGAAACTCCTGTATATATTCAAACAACCATTTATGAGACCAGTACAAACTA
CTCAAGAGGAAGATGGCTGTAGCTGCCGATTTCCAGAAGAAGAAGAAGGAGGATGTGAACTGAGAGTGAAGTTCAGC
AGGAGCGCAGACGCCCCCGCGTACAAGCAGGGCCAGAACCAGCTCTATAACGAGCTCAATCTAGGACGAAGAGAGGA
GTACGATGTTTTGGACAAGAGACGTGGCCGGGACCCTGAGATGGGGGGAAAGCCGAGAAGGAAGAACCCTCAGGAAG
GCCTGTACAATGAACTGCAGAAAGATAAGATGGCGGAGGCCTACAGTGAGATTGGGATGAAAGGCGAGCGCCGGAGG
GGCAAGGGGCACGATGGCCTTTACCAGGGTCTCAGTACAGCCACCAAGGACACCTACGACGCCCTTCACATGCAGGC
CCTGCCCCCTCGCTGATAA
CD8 leader sequence
(SEQ ID NO 1686)
ATGGCCTTACCAGTGACCGCCTTGCTCCTGCCGCTGGCCTTGCTGCTCCACGCCGCCAGGCCG
h20A10-C2 scEV
(SEQ ID NO: 1687)
GAGGTGCAGCTGGTTGAATCTGGCGGCGGACTTGTGAAGCCTGGCGGATCTCTGAGACTGAGCTGTGCCGCCAGCGG
CTTCACCTTTAGCACATACGCCATGAGCTGGGTCCGACAGGCCCCTGGAAAAGGCCTTGAATGGGTTGCCTCTATCG
GCAGAGCCGGCAGCACCTACTACAGCGATTCTGTGAAGGGCAGATTCACCATCAGCCGGGACAACGCCAAGAACAGC
CTGTACCTGCAGATGAACTCCCTGAGAGCCGAGGACACCGCCGTGTACTATTGTGCCAGAGGACCCATCTACAACGA
CTACGACGAGTTCGCCTATTGGGGCCAGGGCACACTGGTCACAGTCAGCTCTGGCGGTGGCGGAagcGGAGGCGGTG
GCtccGGTGGCGGAGGCagcgacattgtgctgacccagtctccagcctccttggccgtgtctccaggacagagggcc
accatcacctgcAAGAGCAGCCAGAGCGTGCTGTACTCCAGCAACCAGAAGAACTACCTGGCCtggtatcagcagaa
accaggacaacctcctaaactcctgatttacTGGGCCAGCACCAGAGAAAGCggggtcccagccaggttcagcggca
gtgggtctgggaccgatttcaccctcacaattaatcctgtggaagctaatgatactgcaaattattactgtCACCAG
TACCTGAGCAGCCTGACCTTCGGCGGAGGGACCAAGGTGGAGATCAAACGA
CD8 hinge region
(SEQ ID NO: 1688)
ACAACAACCCCTGCCCCCAGACCTCCTACCCCAGCCCCTACAATTGCCAGCCAGCCTCTGAGCCTGAGGCCCGAGGC
TTGTAGACCTGCTGCTGGCGGAGCCGTGCACACCAGAGGACTGGATTTCGCCTGCGAC
CD8 transmembrane region
(SEQ ID NO: 1689)
ATCTACATCTGGGCGCCCTTGGCCGGGACTTGTGGGGTCCTTCTCCTGTCACTGGTTATCACCCTTTACTGC
41BB
(SEQ ID NO: 1690)
AAACGGGGCAGAAAGAAACTCCTGTATATATTCAAACAACCATTTATGAGACCAGTACAAACTACTCAAGAGGAAGA
TGGCTGTAGCTGCCGATTTCCAGAAGAAGAAGAAGGAGGATGTGAACTG
CD3
(SEQ ID NO: 1691)
AGAGTGAAGTTCAGCAGGAGCGCAGACGCCCCCGCGTACAAGCAGGGCCAGAACCAGCTCTATAACGAGCTCAATCT
AGGACGAAGAGAGGAGTACGATGTTTTGGACAAGAGACGTGGCCGGGACCCTGAGATGGGGGGAAAGCCGAGAAGGA
AGAACCCTCAGGAAGGCCTGTACAATGAACTGCAGAAAGATAAGATGGCGGAGGCCTACAGTGAGATTGGGATGAAA
GGCGAGCGCCGGAGGGGCAAGGGGCACGATGGCCTTTACCAGGGTCTCAGTACAGCCACCAAGGACACCTACGACGC
CCTTCACATGCAGGCCCTGCCCCCTCGCTGATAA
Construct Name: pCDH MSCV h20A10-O CAR CD28 1XX
Construct backbone: pCDH CMV MCS (SBI)
Promoter MSCV
Leader sequence: Human CD8 alpha (1-63)
scFv Name: Humanized 20A10-O (64-807)
Hinge region: Human CD8 alpha (808-942)
Transmembrane Domain: Human CD8 alpha (943-1014)
Costimulatory Domains: Human CD28 (1015-1137) and CD3 zeta 1XX (1138-1473)
(SEQ ID NO: 1692)
ATGGCCTTACCAGTGACCGCCTTGCTCCTGCCGCTGGCCTTGCTGCTCCACGCCGCCAGGCCGGAGGTGCAGCTGGT
TGAATCTGGCGGCGGACTTGTGAAGCCTGGCGGATCTCTGAGACTGAGCTGTGCCGCCAGCGGCTTCACCTTTAGCA
CATACGCCATGAGCTGGGTCCGACAGGCCCCTGGAAAAGGCCTTGAATGGGTTGCCTCTATCGGCAGAGCCGGCAGC
ACCTACTACAGCGATTCTGTGAAGGGCAGATTCACCATCAGCCGGGACAACGCCAAGAACAGCCTGTACCTGCAGAT
GAACTCCCTGAGAGCCGAGGACACCGCCGTGTACTATTGTGCCAGAGGACCCATCTACAACGACTACGACGAGTTCG
CCTATTGGGGCCAGGGCACACTGGTCACAGTCAGCTCTGGCGGTGGCGGAagcGGAGGCGGTGGCtccGGTGGCGGA
GGCagcGACATCGTGATGACACAGAGCCCTGATAGCCTGGCCGTGTCTCTGGGAGAGAGAGCCACCATCAACTGCAA
GAGCAGCCAGAGCGTGCTGTACTCCAGCAACCAGAAGAACTACCTGGCCTGGTATCAGCAGAAGCCCGGCCAGCCTC
CTAAGCTGCTGATCTACTGGGCCAGCACCAGAGAAAGCGGCGTGCCCGATAGATTTTCTGGCAGCGGCTCTGGCACC
GACTTCACCCTGACAATTAGCTCCCTGCAGGCCGAGGATGTGGCCGTGTACTACTGTCACCAGTACCTGAGCAGCCT
GACCTTTGGCGGCGGAACAAAGGTGGAAATCAAGcgaACAACAACCCCTGCCCCCAGACCTCCTACCCCAGCCCCTA
CAATTGCCAGCCAGCCTCTGAGCCTGAGGCCCGAGGCTTGTAGACCTGCTGCTGGCGGAGCCGTGCACACCAGAGGA
CTGGATTTCGCCTGCGACATCTACATCTGGGCGCCCTTGGCCGGGACTTGTGGGGTCCTTCTCCTGTCACTGGTTAT
CACCCTTTACTGCAGGAGTAAGAGGAGCAGGCTCCTGCACAGTGACTACATGAACATGACTCCTAGAAGACCTGGGC
CTACCAGAAAGCATTACCAGCCCTATGCCCCACCACGCGACTTCGCAGCCTATCGCTCCAGAGTGAAGTTCAGCAGG
AGCGCAGACGCCCCCGCGTACAAGCAGGGCCAGAACCAGCTCTATAACGAGCTCAATCTAGGACGAAGAGAGGAGTA
CGATGTTTTGGACAAGAGACGTGGCCGGGACCCTGAGATGGGGGGAAAGCCGAGAAGGAAGAACCCTCAGGAAGGCC
TGTtCAATGAACTGCAGAAAGATAAGATGGCGGAGGCCTtCAGTGAGATTGGGATGAAAGGCGAGCGCCGGAGGGGC
AAGGGGCACGATGGCCTTTtCCAGGGTCTCAGTACAGCCACCAAGGACACCTtCGACGCCCTTCACATGCAGGCCCT
GCCCCCTCGCTGATAA
CDB leader sequence
(SEQ ID NO: 1693)
ATGGCCTTACCAGTGACCGCCTTGCTCCTGCCGCTGGCCTTGCTGCTCCACGCCGCCAGGCCG
h20A10-0 scF7
(SEQ ID NO: 1694)
GAGGTGCAGCTGGTTGAATCTGGCGGCGGACTTGTGAAGCCTGGCGGATCTCTGAGACTGAGCTGTGCCGCCAGCGG
CTTCACCTTTAGCACATACGCCATGAGCTGGGTCCGACAGGCCCCTGGAAAAGGCCTTGAATGGGTTGCCTCTATCG
GCAGAGCCGGCAGCACCTACTACAGCGATTCTGTGAAGGGCAGATTCACCATCAGCCGGGACAACGCCAAGAACAGC
CTGTACCTGCAGATGAACTCCCTGAGAGCCGAGGACACCGCCGTGTACTATTGTGCCAGAGGACCCATCTACAACGA
CTACGACGAGTTCGCCTATTGGGGCCAGGGCACACTGGTCACAGTCAGCTCTGGCGGTGGCGGAagcGGAGGCGGTG
GCtccGGTGGCGGAGGCagcGACATCGTGATGACACAGAGCCCTGATAGCCTGGCCGTGTCTCTGGGAGAGAGAGCC
ACCATCAACTGCAAGAGCAGCCAGAGCGTGCTGTACTCCAGCAACCAGAAGAACTACCTGGCCTGGTATCAGCAGAA
GCCCGGCCAGCCTCCTAAGCTGCTGATCTACTGGGCCAGCACCAGAGAAAGCGGCGTGCCCGATAGATTTTCTGGCA
GCGGCTCTGGCACCGACTTCACCCTGACAATTAGCTCCCTGCAGGCCGAGGATGTGGCCGTGTACTACTGTCACCAG
TACCTGAGCAGCCTGACCTTTGGCGGCGGAACAAAGGTGGAAATCAAGcga
CDB hinge region
(SEQ ID NO: 1695)
ACAACAACCCCTGCCCCCAGACCTCCTACCCCAGCCCCTACAATTGCCAGCCAGCCTCTGAGCCTGAGGCCCGAGGC
TTGTAGACCTGCTGCTGGCGGAGCCGTGCACACCAGAGGACTGGATTTCGCCTGCGAC
CDB transmembrane region
(SEQ ID NO: 1696)
ATCTACATCTGGGCGCCCTTGGCCGGGACTTGTGGGGTCCTTCTCCTGTCACTGGTTATCACCCTTTACTGC
CD28
(SEQ ID NO: 1697)
AGGAGTAAGAGGAGCAGGCTCCTGCACAGTGACTACATGAACATGACTCCTAGAAGACCTGGGCCTACCAGAAAGCA
TTACCAGCCCTATGCCCCACCACGCGACTTCGCAGCCTATCGCTCC
CD3 1XX
(SEQ ID NO: 1698)
AGAGTGAAGTTCAGCAGGAGCGCAGACGCCCCCGCGTACAAGCAGGGCCAGAACCAGCTCTATAACGAGCTCAATCT
AGGACGAAGAGAGGAGTACGATGTTTTGGACAAGAGACGTGGCCGGGACCCTGAGATGGGGGGAAAGCCGAGAAGGA
AGAACCCTCAGGAAGGCCTGTtCAATGAACTGCAGAAAGATAAGATGGCGGAGGCCTtCAGTGAGATTGGGATGAAA
GGCGAGCGCCGGAGGGGCAAGGGGCACGATGGCCTTTtCCAGGGTCTCAGTACAGCCACCAAGGACACCTtCGACGC
CCTTCACATGCAGGCCCTGCCCCCTCGCTGATAA
Constructu Name: pCDH MSCV h20A10-N CAR CD28 1XX
Constructu backbone: pCDH CMV MCS (SBI)
Promoter MSCV
Leader sequence: Human CD8 alpha (1-63)
scFv Name: Humanized 20A10-N (64-807)
Hinge region: Human CD8 alpha (808-942)
Transmembrane Doamin: Human CD8 alpha (943-1014)
Costimulatory Domains: Human CD28 (1015-1137) and CD3 zeta 1XX(1138-1473)
(SEQ ID NO: 1699)
ATGGCCTTACCAGTGACCGCCTTGCTCCTGCCGCTGGCCTTGCTGCTCCACGCCGCCAGGCCGCAGGTGCAGCTGGT
TGAATCTGGCGGCGGACTTGTGAAGCCTGGCGGATCTCTGAGACTGAGCTGTGCCGCCAGCGGCTTCACCTTTAGCA
CATACGCCATGAGCTGGATCAGACAGGCCCCTGGCAAAGGCCTGGAATGGGTGgcgTCTATTGGCAGAGCCGGCAGC
ACCTACTACAGCGACTCTGTGAAGGGCAGATTCACCATCAGCCGGGACAACGCCAAGAACAGCCTGTACCTGCAGAT
GAACTCCCTGAGAGCCGAGGACACCGCCGTGTACTATTGTGCCAGAGGACCCATCTACAACGACTACGACGAGTTCG
CCTATTGGGGCCAGGGCACACTGGTCACAGTTTCTAGCGGCGGTGGCGGAagcGGAGGCGGTGGCtccGGTGGCGGA
GGCagcGAAATTGTGCTGACACAGAGCCCCGCCACACTGTCACTTTCTCCAGGCGAAAGAGCCACACTGAGCTGCAA
GAGCAGCCAGAGCGTGCTGTACTCCAGCAACCAGAAGAACTACCTGGCCTGGTATCAGCAGAAGCCCGGCCAAGCTC
CTCGGCTGCTGATCTATTGGGCCAGCACAAGAGAGAGCGGCATCCCTGCCAGATTTTCTGGCAGCGGCTCTGGCACC
GATTTCACCCTGACCATAAGCAGCCTGGAACCTGAGGACTTCGCCGTGTATTACTGCCACCAGTACCTGAGCAGCCT
GACCTTTGGCGGAGGCACCAAGGTGGAAATCAAGCGGACAACAACCCCTGCCCCCAGACCTCCTACCCCAGCCCCTA
CAATTGCCAGCCAGCCTCTGAGCCTGAGGCCCGAGGCTTGTAGACCTGCTGCTGGCGGAGCCGTGCACACCAGAGGA
CTGGATTTCGCCTGCGACATCTACATCTGGGCGCCCTTGGCCGGGACTTGTGGGGTCCTTCTCCTGTCACTGGTTAT
CACCCTTTACTGCAGGAGTAAGAGGAGCAGGCTCCTGCACAGTGACTACATGAACATGACTCCTAGAAGACCTGGGC
CTACCAGAAAGCATTACCAGCCCTATGCCCCACCACGCGACTTCGCAGCCTATCGCTCCAGAGTGAAGTTCAGCAGG
AGCGCAGACGCCCCCGCGTACAAGCAGGGCCAGAACCAGCTCTATAACGAGCTCAATCTAGGACGAAGAGAGGAGTA
CGATGTTTTGGACAAGAGACGTGGCCGGGACCCTGAGATGGGGGGAAAGCCGAGAAGGAAGAACCCTCAGGAAGGCC
TGTtCAATGAACTGCAGAAAGATAAGATGGCGGAGGCCTtCAGTGAGATTGGGATGAAAGGCGAGCGCCGGAGGGGC
AAGGGGCACGATGGCCTTTtCCAGGGTCTCAGTACAGCCACCAAGGACACCTtCGACGCCCTTCACATGCAGGCCCT
GCCCCCTCGCTGATAA
CD8 leader sequence
(SEQ ID NO: 1700)
ATGGCCTTACCAGTGACCGCCTTGCTCCTGCCGCTGGCCTTGCTGCTCCACGCCGCCAGGCCG
h20A10-N scEV
(SEQ ID NO: 1701)
CAGGTGCAGCTGGTTGAATCTGGCGGCGGACTTGTGAAGCCTGGCGGATCTCTGAGACTGAGCTGTGCCGCCAGCGG
CTTCACCTTTAGCACATACGCCATGAGCTGGATCAGACAGGCCCCTGGCAAAGGCCTGGAATGGGTGgcgTCTATTG
GCAGAGCCGGCAGCACCTACTACAGCGACTCTGTGAAGGGCAGATTCACCATCAGCCGGGACAACGCCAAGAACAGC
CTGTACCTGCAGATGAACTCCCTGAGAGCCGAGGACACCGCCGTGTACTATTGTGCCAGAGGACCCATCTACAACGA
CTACGACGAGTTCGCCTATTGGGGCCAGGGCACACTGGTCACAGTTTCTAGCGGCGGTGGCGGAagcGGAGGCGGTG
GCtccGGTGGCGGAGGCagcGAAATTGTGCTGACACAGAGCCCCGCCACACTGTCACTTTCTCCAGGCGAAAGAGCC
ACACTGAGCTGCAAGAGCAGCCAGAGCGTGCTGTACTCCAGCAACCAGAAGAACTACCTGGCCTGGTATCAGCAGAA
GCCCGGCCAAGCTCCTCGGCTGCTGATCTATTGGGCCAGCACAAGAGAGAGCGGCATCCCTGCCAGATTTTCTGGCA
GCGGCTCTGGCACCGATTTCACCCTGACCATAAGCAGCCTGGAACCTGAGGACTTCGCCGTGTATTACTGCCACCAG
TACCTGAGCAGCCTGACCTTTGGCGGAGGCACCAAGGTGGAAATCAAGCGG
CDB hinge region
(SEQ ID NO: 1702)
ACAACAACCCCTGCCCCCAGACCTCCTACCCCAGCCCCTACAATTGCCAGCCAGCCTCTGAGCCTGAGGCCCGAGGC
TTGTAGACCTGCTGCTGGCGGAGCCGTGCACACCAGAGGACTGGATTTCGCCTGCGAC
CDB transmembrane domain
(SEQ ID NO: 1703)
ATCTACATCTGGGCGCCCTTGGCCGGGACTTGTGGGGTCCTTCTCCTGTCACTGGTTATCACCCTTTACTGC
CD28
(SEQ ID NO: 1704)
AGGAGTAAGAGGAGCAGGCTCCTGCACAGTGACTACATGAACATGACTCCTAGAAGACCTGGGCCTACCAGAAAGCA
TTACCAGCCCTATGCCCCACCACGCGACTTCGCAGCCTATCGCTCC
CD3 1XX
(SEQ ID NO: 1705)
AGAGTGAAGTTCAGCAGGAGCGCAGACGCCCCCGCGTACAAGCAGGGCCAGAACCAGCTCTATAACGAGCTCAATCT
AGGACGAAGAGAGGAGTACGATGTTTTGGACAAGAGACGTGGCCGGGACCCTGAGATGGGGGGAAAGCCGAGAAGGA
AGAACCCTCAGGAAGGCCTGTtCAATGAACTGCAGAAAGATAAGATGGCGGAGGCCTtCAGTGAGATTGGGATGAAA
GGCGAGCGCCGGAGGGGCAAGGGGCACGATGGCCTTTtCCAGGGTCTCAGTACAGCCACCAAGGACACCTtCGACGC
CCTTCACATGCAGGCCCTGCCCCCTCGCTGATAA
Constructu Name: pCDH MSCV h20A10-C2 CAR CD28 1XX
Construct backbone: pCDH CMV MCS (SBI)
Promoter MSCV
Leader sequence: Human CD8 alpha (1-63)
scFv Name: Humanized 20A10-C2 (64-807)
Hinge region: Human CD8 alpha (808-942)
Transmembrane Domain: Human CD8 alpha (943-1014)
Costimulatory Domains: Human CD28 (1015-1137) and CD3 zeta 1XX (1138-1473)
(SEQ ID NO: 1706)
ATGGCCTTACCAGTGACCGCCTTGCTCCTGCCGCTGGCCTTGCTGCTCCACGCCGCCAGGCCGGAGGTGCAGCTGGT
TGAATCTGGCGGCGGACTTGTGAAGCCTGGCGGATCTCTGAGACTGAGCTGTGCCGCCAGCGGCTTCACCTTTAGCA
CATACGCCATGAGCTGGGTCCGACAGGCCCCTGGAAAAGGCCTTGAATGGGTTGCCTCTATCGGCAGAGCCGGCAGC
ACCTACTACAGCGATTCTGTGAAGGGCAGATTCACCATCAGCCGGGACAACGCCAAGAACAGCCTGTACCTGCAGAT
GAACTCCCTGAGAGCCGAGGACACCGCCGTGTACTATTGTGCCAGAGGACCCATCTACAACGACTACGACGAGTTCG
CCTATTGGGGCCAGGGCACACTGGTCACAGTCAGCTCTGGCGGTGGCGGAagcGGAGGCGGTGGCtccGGTGGCGGA
GGCagcgacattgtgctgacccagtctccagcctccttggccgtgtctccaggacagagggccaccatcacctgcAA
GAGCAGCCAGAGCGTGCTGTACTCCAGCAACCAGAAGAACTACCTGGCCtggtatcagcagaaaccaggacaacctc
ctaaactcctgatttacTGGGCCAGCACCAGAGAAAGCggggtcccagccaggttcagcggcagtgggtctgggacc
gatttcaccctcacaattaatcctgtggaagctaatgatactgcaaattattactgtCACCAGTACCTGAGCAGCCT
GACCTTCGGCGGAGGGACCAAGGTGGAGATCAAACGAACAACAACCCCTGCCCCCAGACCTCCTACCCCAGCCCCTA
CAATTGCCAGCCAGCCTCTGAGCCTGAGGCCCGAGGCTTGTAGACCTGCTGCTGGCGGAGCCGTGCACACCAGAGGA
CTGGATTTCGCCTGCGACATCTACATCTGGGCGCCCTTGGCCGGGACTTGTGGGGTCCTTCTCCTGTCACTGGTTAT
CACCCTTTACTGCAGGAGTAAGAGGAGCAGGCTCCTGCACAGTGACTACATGAACATGACTCCTAGAAGACCTGGGC
CTACCAGAAAGCATTACCAGCCCTATGCCCCACCACGCGACTTCGCAGCCTATCGCTCCAGAGTGAAGTTCAGCAGG
AGCGCAGACGCCCCCGCGTACAAGCAGGGCCAGAACCAGCTCTATAACGAGCTCAATCTAGGACGAAGAGAGGAGTA
CGATGTTTTGGACAAGAGACGTGGCCGGGACCCTGAGATGGGGGGAAAGCCGAGAAGGAAGAACCCTCAGGAAGGCC
TGTtCAATGAACTGCAGAAAGATAAGATGGCGGAGGCCTtCAGTGAGATTGGGATGAAAGGCGAGCGCCGGAGGGGC
AAGGGGCACGATGGCCTTTtCCAGGGTCTCAGTACAGCCACCAAGGACACCTtCGACGCCCTTCACATGCAGGCCCT
GCCCCCTCGCTGATAA
CD8 leader sequence
(SEQ ID NO: 1707)
ATGGCCTTACCAGTGACCGCCTTGCTCCTGCCGCTGGCCTTGCTGCTCCACGCCGCCAGGCCG
h20A10-C2 scEV
(SEQ ID NO: 1708)
GAGGTGCAGCTGGTTGAATCTGGCGGCGGACTTGTGAAGCCTGGCGGATCTCTGAGACTGAGCTGTGCCGCCAGCGG
CTTCACCTTTAGCACATACGCCATGAGCTGGGTCCGACAGGCCCCTGGAAAAGGCCTTGAATGGGTTGCCTCTATCG
GCAGAGCCGGCAGCACCTACTACAGCGATTCTGTGAAGGGCAGATTCACCATCAGCCGGGACAACGCCAAGAACAGC
CTGTACCTGCAGATGAACTCCCTGAGAGCCGAGGACACCGCCGTGTACTATTGTGCCAGAGGACCCATCTACAACGA
CTACGACGAGTTCGCCTATTGGGGCCAGGGCACACTGGTCACAGTCAGCTCTGGCGGTGGCGGAagcGGAGGCGGTG
GCtccGGTGGCGGAGGCagcgacattgtgctgacccagtctccagcctccttggccgtgtctccaggacagagggcc
accatcacctgcAAGAGCAGCCAGAGCGTGCTGTACTCCAGCAACCAGAAGAACTACCTGGCCtggtatcagcagaa
accaggacaacctcctaaactcctgatttacTGGGCCAGCACCAGAGAAAGCggggtcccagccaggttcagcggca
gtgggtctgggaccgatttcaccctcacaattaatcctgtggaagctaatgatactgcaaattattactgtCACCAG
TACCTGAGCAGCCTGACCTTCGGCGGAGGGACCAAGGTGGAGATCAAACGA
CD8 hinge region
(SEQ ID NO: 1709)
ACAACAACCCCTGCCCCCAGACCTCCTACCCCAGCCCCTACAATTGCCAGCCAGCCTCTGAGCCTGAGGCCCGAGGC
TTGTAGACCTGCTGCTGGCGGAGCCGTGCACACCAGAGGACTGGATTTCGCCTGCGAC
CD8 transmembrane region
(SEQ ID NO: 1710)
ATCTACATCTGGGCGCCCTTGGCCGGGACTTGTGGGGTCCTTCTCCTGTCACTGGTTATCACCCTTTACTGC
CD28
(SEQ ID NO: 1711)
AGGAGTAAGAGGAGCAGGCTCCTGCACAGTGACTACATGAACATGACTCCTAGAAGACCTGGGCCTACCAGAAAGCA
TTACCAGCCCTATGCCCCACCACGCGACTTCGCAGCCTATCGCTCC
CD3 1XX
(SEQ ID NO: 1712)
AGAGTGAAGTTCAGCAGGAGCGCAGACGCCCCCGCGTACAAGCAGGGCCAGAACCAGCTCTATAACGAGCTCAATCT
AGGACGAAGAGAGGAGTACGATGTTTTGGACAAGAGACGTGGCCGGGACCCTGAGATGGGGGGAAAGCCGAGAAGGA
AGAACCCTCAGGAAGGCCTGTtCAATGAACTGCAGAAAGATAAGATGGCGGAGGCCTtCAGTGAGATTGGGATGAAA
GGCGAGCGCCGGAGGGGCAAGGGGCACGATGGCCTTTtCCAGGGTCTCAGTACAGCCACCAAGGACACCTtCGACGC
CCTTCACATGCAGGCCCTGCCCCCTCGCTGATAA
Constructu Name: pCDH MSCV hC2 CAR 41BB 6xNFATFoxP3 IL18
Constructu backbone: pCDH CMV MCS (SBI)
Promoter MSCV
Leader sequence: Human CD8 alpha (1-63)
scFv Name: Humanized C2 (64-8010)
Hinge region: Human CD8 alpha (811-945)
Transmembrane Domain: Human CD8 alpha (946-1017)
Costimulatory Domains: Human 41BB (1018-1143) and CD3 zeta (1144-1479)
NFAT response element: Human FoxP3 NFAT (6x) response element (1530-1691)
Minimal promoter: mCMV (1698-1815)
Leader sequence: Human CD8 alpha (1841-1903)
Cytokine: Human IL18 (1904-2374)
(SEQ ID NO: 1713)
ATGGCCTTACCAGTGACCGCCTTGCTCCTGCCGCTGGCCTTGCTGCTCCACGCCGCCAGGCCGGAGGTGCAGCTGGT
GGAGTCTGGGGGAGGCCTGGTCAAGCCTGGGGGGTCCCTGAGACTCTCCTGTGCAGCCTCTGGATTCACCTTCAGTG
GCTATGCCATGAGCTGGGTCCGCCAGGCTCCAGGGAAGGGGCTGGAGTGGGTCTCAACCATTAGTAGTGGCGGAACC
TACATATACTACCCCGACTCAGTGAAGGGCCGATTCACCATCTCCAGAGACAACGCCAAGAACTCACTGTATCTGCA
AATGAACAGCCTGAGAGCCGAGGACACGGCCGTGTATTACTGTGCGAGACTTGGGGGGGATAATTACTACGAATACT
TCGATGTCTGGGGCAAAGGGACCACGGTCACCGTCTCCTCCGGCGGTGGCGGATCCGGCGGTGGCGGATCCGGCGGT
GGCGGATCCGACATTGTGCTGACCCAGTCTCCAGCCTCCTTGGCCGTGTCTCCAGGACAGAGGGCCACCATCACCTG
CAGAGCCAGTAAGAGTGTCAGTACCAGCGGATACTCCTACATGCACTGGTATCAGCAGAAACCAGGACAACCTCCTA
AACTCCTGATTTACCTGGCATCCAATCTGGAGAGCGGGGTCCCAGCCAGGTTCAGCGGCAGTGGGTCTGGGACCGAT
TTCACCCTCACAATTAATCCTGTGGAAGCTAATGATACTGCAAATTATTACTGTCAGCACAGTAGGGAGCTGCCTTT
CACATTCGGCGGAGGGACCAAGGTGGAGATCAAACGAACTACAACAACCCCTGCCCCCAGACCTCCTACCCCAGCCC
CTACAATTGCCAGCCAGCCTCTGAGCCTGAGGCCCGAGGCTTGTAGACCTGCTGCTGGCGGAGCCGTGCACACCAGA
GGACTGGATTTCGCCTGCGACATCTACATCTGGGCGCCCTTGGCCGGGACTTGTGGGGTCCTTCTCCTGTCACTGGT
TATCACCCTTTACTGCAAACGGGGCAGAAAGAAACTCCTGTATATATTCAAACAACCATTTATGAGACCAGTACAAA
CTACTCAAGAGGAAGATGGCTGTAGCTGCCGATTTCCAGAAGAAGAAGAAGGAGGATGTGAACTGAGAGTGAAGTTC
AGCAGGAGCGCAGACGCCCCCGCGTACAAGCAGGGCCAGAACCAGCTCTATAACGAGCTCAATCTAGGACGAAGAGA
GGAGTACGATGTTTTGGACAAGAGACGTGGCCGGGACCCTGAGATGGGGGGAAAGCCGAGAAGGAAGAACCCTCAGG
AAGGCCTGTACAATGAACTGCAGAAAGATAAGATGGCGGAGGCCTACAGTGAGATTGGGATGAAAGGCGAGCGCCGG
AGGGGCAAGGGGCACGATGGCCTTTACCAGGGTCTCAGTACAGCCACCAAGGACACCTACGACGCCCTTCACATGCA
GGCCCTGCCCCCTCGCTGATAAGTTTAAACTGCCAGAACATTTCTCTGGCCTAACTGGCCGGTACCGGCTTCATTTT
TTCCATTTACTGCAGAGGCTTCATTTTTTCCATTTACTGCAGAGGCTTCATTTTTTCCATTTACTGCAGAGGCTTCA
TTTTTTCCATTTACTGCAGAGGCTTCATTTTTTCCATTTACTGCAGAGGCTTCATTTTTTCCATTTACTGCAGAact
agttaggcgtgtacggtgggaggcctatataagcagagctcgtttagtgaaccgtcagatcgcctggagacgccatc
cacgctgttttgacctccatagaagacaccgggaccgatccagcCTCGAGAGACCCAATGCTAGCCACCATGGCCTT
ACCAGTGACCGCCTTGCTCCTGCCGCTGGCCTTGCTGCTCCACGCCGCCAGGCCGTACTTCGGCAAGCTGGAAAGCA
AGCTGAGCGTGATCCGGAACCTGAACGACCAGGTGCTGTTCATCGATCAGGGCAACAGACCCCTGTTCGAGGACATG
ACCGACAGCGACTGCAGAGACAACGCCCCTCGGACCATCTTCATCATCAGCATGTACAAGGACAGCCAGCCTAGAGG
CATGGCCGTGACCATCTCTGTGAAGTGCGAGAAGATCAGCACCCTGAGCTGCGAGAACAAGATCATCAGCTTCAAAG
AGATGAACCCGCCGGACAACATCAAGGACACCAAGAGCGACATCATATTCTTCCAGCGGAGCGTGCCCGGCCACGAC
AACAAGATGCAGTTTGAGAGCAGCAGCTACGAGGGCTACTTCCTGGCCTGCGAGAAAGAGCGGGACCTGTTCAAGCT
GATCCTGAAGAAAGAGGACGAACTGGGCGACCGCAGCATCATGTTCACCGTGCAGAACGAGGACTGAtaa
CD8 leader sequence
(SEQ ID NO: 1714)
ATGGCCTTACCAGTGACCGCCTTGCTCCTGCCGCTGGCCTTGCTGCTCCACGCCGCCAGGCCG
C2 scFV
(SEQ ID NO: 1715)
GAGGTGCAGCTGGTGGAGTCTGGGGGAGGCCTGGTCAAGCCTGGGGGGTCCCTGAGACTCTCCTGTGCAGCCTCTGG
ATTCACCTTCAGTGGCTATGCCATGAGCTGGGTCCGCCAGGCTCCAGGGAAGGGGCTGGAGTGGGTCTCAACCATTA
GTAGTGGCGGAACCTACATATACTACCCCGACTCAGTGAAGGGCCGATTCACCATCTCCAGAGACAACGCCAAGAAC
TCACTGTATCTGCAAATGAACAGCCTGAGAGCCGAGGACACGGCCGTGTATTACTGTGCGAGACTTGGGGGGGATAA
TTACTACGAATACTTCGATGTCTGGGGCAAAGGGACCACGGTCACCGTCTCCTCCGGCGGTGGCGGATCCGGCGGTG
GCGGATCCGGCGGTGGCGGATCCGACATTGTGCTGACCCAGTCTCCAGCCTCCTTGGCCGTGTCTCCAGGACAGAGG
GCCACCATCACCTGCAGAGCCAGTAAGAGTGTCAGTACCAGCGGATACTCCTACATGCACTGGTATCAGCAGAAACC
AGGACAACCTCCTAAACTCCTGATTTACCTGGCATCCAATCTGGAGAGCGGGGTCCCAGCCAGGTTCAGCGGCAGTG
GGTCTGGGACCGATTTCACCCTCACAATTAATCCTGTGGAAGCTAATGATACTGCAAATTATTACTGTCAGCACAGT
AGGGAGCTGCCTTTCACATTCGGCGGAGGGACCAAGGTGGAGATCAAACGAACT
CD8 hinge region
(SEQ ID NO: 1716)
ACAACAACCCCTGCCCCCAGACCTCCTACCCCAGCCCCTACAATTGCCAGCCAGCCTCTGAGCCTGAGGCCCGAGGC
TTGTAGACCTGCTGCTGGCGGAGCCGTGCACACCAGAGGACTGGATTTCGCCTGCGAC
CD8 transmembrane region
(SEQ ID NO: 1717)
ATCTACATCTGGGCGCCCTTGGCCGGGACTTGTGGGGTCCTTCTCCTGTCACTGGTTATCACCCTTTACTGC
41E13
(SEQ ID NO: 1718)
AAACGGGGCAGAAAGAAACTCCTGTATATATTCAAACAACCATTTATGAGACCAGTACAAACTACTCAAGAGGAAGA
TGGCTGTAGCTGCCGATTTCCAGAAGAAGAAGAAGGAGGATGTGAACTG
CD3
(SEQ ID NO: 1719)
AGAGTGAAGTTCAGCAGGAGCGCAGACGCCCCCGCGTACAAGCAGGGCCAGAACCAGCTCTATAACGAGCTCAATCT
AGGACGAAGAGAGGAGTACGATGTTTTGGACAAGAGACGTGGCCGGGACCCTGAGATGGGGGGAAAGCCGAGAAGGA
AGAACCCTCAGGAAGGCCTGTACAATGAACTGCAGAAAGATAAGATGGCGGAGGCCTACAGTGAGATTGGGATGAAA
GGCGAGCGCCGGAGGGGCAAGGGGCACGATGGCCTTTACCAGGGTCTCAGTACAGCCACCAAGGACACCTACGACGC
CCTTCACATGCAGGCCCTGCCCCCTCGC
plasmid
(SEQ ID NO: 1720)
TGATAAGTTTAAACTGCCAGAACATTTCTCTGGCCTAACTGGCCGGTACC
6xNFAT FoxP3
(SEQ ID NO: 1721)
GGCTTCATTTTTTCCATTTACTGCAGAGGCTTCATTTTTTCCATTTACTGCAGAGGCTTCATTTTTTCCATTTACTG
CAGAGGCTTCATTTTTTCCATTTACTGCAGAGGCTTCATTTTTTCCATTTACTGCAGAGGCTTCATTTTTTCCATTT
ACTGCAGAactagt
mCMV
(SEQ ID NO: 1722)
Taggcgtgtacggtgggaggcctatataagcagagctcgtttagtgaaccgtcagatcgcctggagacgccatccac
gctgttttgacctccatagaagacaccgggaccgatccagc
plasmid
(SEQ ID NO: 1723)
CTCGAGAGACCCAATGCTAGCCACC
CD8 leader sequence
(SEQ ID NO: 1724)
ATGGCCTTACCAGTGACCGCCTTGCTCCTGCCGCTGGCCTTGCTGCTCCACGCCGCCAGGCCG
IL18
(SEQ ID NO: 1725)
TACTTCGGCAAGCTGGAAAGCAAGCTGAGCGTGATCCGGAACCTGAACGACCAGGTGCTGTTCATCGATCAGGGCAA
CAGACCCCTGTTCGAGGACATGACCGACAGCGACTGCAGAGACAACGCCCCTCGGACCATCTTCATCATCAGCATGT
ACAAGGACAGCCAGCCTAGAGGCATGGCCGTGACCATCTCTGTGAAGTGCGAGAAGATCAGCACCCTGAGCTGCGAG
AACAAGATCATCAGCTTCAAAGAGATGAACCCGCCGGACAACATCAAGGACACCAAGAGCGACATCATATTCTTCCA
GCGGAGCGTGCCCGGCCACGACAACAAGATGCAGTTTGAGAGCAGCAGCTACGAGGGCTACTTCCTGGCCTGCGAGA
AAGAGCGGGACCTGTTCAAGCTGATCCTGAAGAAAGAGGACGAACTGGGCGACCGCAGCATCATGTTCACCGTGCAG
AACGAGGACTGAtaa
Construct Name: pCDH MSCV hC2 CAR CD28 1XX
Construct backbone: pCDH CMV MCS (SBI)
Promoter MSCV
Leader sequence: Human CD8 alpha (1-63)
scFv Name: Humanized C2 (64-8010)
Hinge region: Human CD8 alpha (811-945)
Transmembrane Domain: Human CD8 alpha (946-1017)
Costimulatory Domains: Human CD28 (1018-1140) and CD3 zeta 1XX (1141-1476)
(SEQ ID NO: 1726)
ATGGCCTTACCAGTGACCGCCTTGCTCCTGCCGCTGGCCTTGCTGCTCCACGCCGCCAGGCCGGAGGTGCAGCTGGT
GGAGTCTGGGGGAGGCCTGGTCAAGCCTGGGGGGTCCCTGAGACTCTCCTGTGCAGCCTCTGGATTCACCTTCAGTG
GCTATGCCATGAGCTGGGTCCGCCAGGCTCCAGGGAAGGGGCTGGAGTGGGTCTCAACCATTAGTAGTGGCGGAACC
TACATATACTACCCCGACTCAGTGAAGGGCCGATTCACCATCTCCAGAGACAACGCCAAGAACTCACTGTATCTGCA
AATGAACAGCCTGAGAGCCGAGGACACGGCCGTGTATTACTGTGCGAGACTTGGGGGGGATAATTACTACGAATACT
TCGATGTCTGGGGCAAAGGGACCACGGTCACCGTCTCCTCCGGCGGTGGCGGATCCGGCGGTGGCGGATCCGGCGGT
GGCGGATCCGACATTGTGCTGACCCAGTCTCCAGCCTCCTTGGCCGTGTCTCCAGGACAGAGGGCCACCATCACCTG
CAGAGCCAGTAAGAGTGTCAGTACCAGCGGATACTCCTACATGCACTGGTATCAGCAGAAACCAGGACAACCTCCTA
AACTCCTGATTTACCTGGCATCCAATCTGGAGAGCGGGGTCCCAGCCAGGTTCAGCGGCAGTGGGTCTGGGACCGAT
TTCACCCTCACAATTAATCCTGTGGAAGCTAATGATACTGCAAATTATTACTGTCAGCACAGTAGGGAGCTGCCTTT
CACATTCGGCGGAGGGACCAAGGTGGAGATCAAACGAACTACAACAACCCCTGCCCCCAGACCTCCTACCCCAGCCC
CTACAATTGCCAGCCAGCCTCTGAGCCTGAGGCCCGAGGCTTGTAGACCTGCTGCTGGCGGAGCCGTGCACACCAGA
GGACTGGATTTCGCCTGCGACATCTACATCTGGGCGCCCTTGGCCGGGACTTGTGGGGTCCTTCTCCTGTCACTGGT
TATCACCCTTTACTGCAGGAGTAAGAGGAGCAGGCTCCTGCACAGTGACTACATGAACATGACTCCTAGAAGACCTG
GGCCTACCAGAAAGCATTACCAGCCCTATGCCCCACCACGCGACTTCGCAGCCTATCGCTCCAGAGTGAAGTTCAGC
AGGAGCGCAGACGCCCCCGCGTACAAGCAGGGCCAGAACCAGCTCTATAACGAGCTCAATCTAGGACGAAGAGAGGA
GTACGATGTTTTGGACAAGAGACGTGGCCGGGACCCTGAGATGGGGGGAAAGCCGAGAAGGAAGAACCCTCAGGAAG
GCCTGTtCAATGAACTGCAGAAAGATAAGATGGCGGAGGCCTtCAGTGAGATTGGGATGAAAGGCGAGCGCCGGAGG
GGCAAGGGGCACGATGGCCTTTtCCAGGGTCTCAGTACAGCCACCAAGGACACCTtCGACGCCCTTCACATGCAGGC
CCTGCCCCCTCGCTGATAA
CD8 leader sequence
(SEQ ID NO: 1727)
ATGGCCTTACCAGTGACCGCCTTGCTCCTGCCGCTGGCCTTGCTGCTCCACGCCGCCAGGCCG
C2 scEV
(SEQ ID NO: 1728)
GAGGTGCAGCTGGTGGAGTCTGGGGGAGGCCTGGTCAAGCCTGGGGGGTCCCTGAGACTCTCCTGTGCAGCCTCTGG
ATTCACCTTCAGTGGCTATGCCATGAGCTGGGTCCGCCAGGCTCCAGGGAAGGGGCTGGAGTGGGTCTCAACCATTA
GTAGTGGCGGAACCTACATATACTACCCCGACTCAGTGAAGGGCCGATTCACCATCTCCAGAGACAACGCCAAGAAC
TCACTGTATCTGCAAATGAACAGCCTGAGAGCCGAGGACACGGCCGTGTATTACTGTGCGAGACTTGGGGGGGATAA
TTACTACGAATACTTCGATGTCTGGGGCAAAGGGACCACGGTCACCGTCTCCTCCGGCGGTGGCGGATCCGGCGGTG
GCGGATCCGGCGGTGGCGGATCCGACATTGTGCTGACCCAGTCTCCAGCCTCCTTGGCCGTGTCTCCAGGACAGAGG
GCCACCATCACCTGCAGAGCCAGTAAGAGTGTCAGTACCAGCGGATACTCCTACATGCACTGGTATCAGCAGAAACC
AGGACAACCTCCTAAACTCCTGATTTACCTGGCATCCAATCTGGAGAGCGGGGTCCCAGCCAGGTTCAGCGGCAGTG
GGTCTGGGACCGATTTCACCCTCACAATTAATCCTGTGGAAGCTAATGATACTGCAAATTATTACTGTCAGCACAGT
AGGGAGCTGCCTTTCACATTCGGCGGAGGGACCAAGGTGGAGATCAAACGAACT
CD8 hinge region
(SEQ ID NO: 1729)
ACAACAACCCCTGCCCCCAGACCTCCTACCCCAGCCCCTACAATTGCCAGCCAGCCTCTGAGCCTGAGGCCCGAGGC
TTGTAGACCTGCTGCTGGCGGAGCCGTGCACACCAGAGGACTGGATTTCGCCTGCGAC
CD8 transmembrane region
(SEQ ID NO: 1730)
ATCTACATCTGGGCGCCCTTGGCCGGGACTTGTGGGGTCCTTCTCCTGTCACTGGTTATCACCCTTTACTGC
CD28
(SEQ ID NO: 1731)
AGGAGTAAGAGGAGCAGGCTCCTGCACAGTGACTACATGAACATGACTCCTAGAAGACCTGGGCCTACCAGAAAGCA
TTACCAGCCCTATGCCCCACCACGCGACTTCGCAGCCTATCGCTCC
CD3 1XX
(SEQ ID NO: 1732)

[chemical structure]

[chemical structure]

[chemical structure]

[chemical structure]

Mouse B12 light chain variable framework 2 (FR2) sequence:
(DNA)
(SEQ ID NO: 1733)
tggtatcagcagaaaccaggacagccacccaaactcctcatctat
(amino acids)
(SEQ ID NO: 1734)
WYQQKPGQPPKLLIY
Mouse B12 light chain variable complementarity determining regions 2 (CDR2)
Sequence:
(DNA)
(SEQ ID NO: 1735)
cttgcatccaccctagattct
(amino acids)
(SEQ ID NO: 1736)
LASTLDS
Mouse B12 light chain variable framework 3 (FR3) sequence:
(DNA)
(SEQ ID NO: 1737)
ggggtccctgccaggttcagtggcagtgggtctaggacagacttcaccctcaccattgatcctgtggaggctgatga
tgctgcaacctattactgt
(amino acids)
(SEQ ID NO: 1738)
GVPARFSGSGSRTDFTLTIDPVEADDAATYYC
Mouse B12 light chain variable complementarity determining regions 3 (CDR3)
Sequence:
(DNA)
(SEQ ID NO: 1739)
cagcaaaataatgaggatcctccgacg
(amino acids)
(SEQ ID NO: 1740)
QQNNEDPPT
Mouse B12 light chain variable framework 4 (FR4) sequence:
(DNA)
(SEQ ID NO: 1741)
ttcggtggaggcaccaagctggaaatcaagg
(amino acids)
(SEQ ID NO: 1742)
FGGGTKLEIK
epitope to which NME1 and NME7AB bind part of the 10 membrane proximal amino
acids
(SEQ ID NO: 1743)
PFPFSAQSGA
(SEQ ID NO: 1744)
SNIKFRPGSVV
(SEQ ID NO: 1745)
ASRYNLT
Fragment of PSMGFR
(SEQ ID NO: 1746)
GTINVHDVET
Fragment of PSMGFR
(SEQ ID NO: 1747)
FPFS
Fragment of PSMGFR
(SEQ ID NO: 1748)
SNIKFRPGSVVVQLTLAFRE
Fragment of PSMGFR
(SEQ ID NO: 1749)
QFNQYKTEA
Fragment of PSMGFR
(SEQ ID NO: 1750)
VQLTLAFRE
Fragment of PSMGFR
(SEQ ID NO: 1751)
SVSDV
IL18 sequence
(DNA)
(SEQ ID NO: 1752)
Atagaagacaccgggaccgatccagcctcgagagacccaatgctagccaccatggccttaccagtgac
cgccttgctcctgccgctggccttgctgctccacgccgccaggccgtacttcggcaagctggaaagcaagctgagcg
tgatccggaacctgaacgaccaggtgctgttcatcgatcagggcaacagacccctgttcgaggacatgaccgacagc
gactgcagagacaacgcccctcggaccatcttcatcatcagcatgtacaaggacagccagcctagaggcatggccgt
gaccatctctgtgaagtgcgagaagatcagcaccctgagctgcgagaacaagatcatcagcttcaaagagatgaacc
cgccggacaacatcaaggacaccaagagcgacatcatattcttccagcggagcgtgcccggccacgacaacaagatg
cagtttgagagcagcagctacgagggctacttcctggcctgcgagaaagagcgggacctgttcaagctgatcctgaa
gaaagaggacgaactgggcgaccgcagcatcatgttcaccgtgcagaacgaggactgataaaagcttggcaatccgg
tactgttggtaaagccacca
(amino acids)
(SEQ ID NO: 1753)
IEDTGTDPASRDPMLATMALPVTALLLPLALLLHAARPYFGKLESKLSVIRMLNDQVLFIDQGNRPLFEDMTDSDCR
DNAPRTIFIISMYKDSQPRGMAVTISVKCEKISTLSCENKIISFKEMNPPDNIKDTKSDIIFFQRSVPGHDNKMQFE
SSSYEGYFLACEKERDLFKLILKKEDELGDRSIMFTVQNED**KLGNPVLLVKPP
primer
(SEQ ID NO: 1754)
5′-agggagacccaagctggctagttaagcttggatggccttaccagtgaccgccttgc-3′
primer
(SEQ ID NO: 1755)
5′-taggccagagaaatgttctggcattatcagcgagggggcagggcctgc-3′
(SEQ ID NO: 1756)
5′-tgccagaacatttctctgg-3′
(SEQ ID NO: 1757)
5′-acagtcgaggctgatcagcgggtttaaacttatcagtcctcgttctgcacgg-3′
(SEQ ID NO: 1758)
5′-atgcaggccctgccccctcgctgataagtttaaactgccagaacatttctctggcctaac-3′
(SEQ ID NO: 1759)
5′-accggagcgatcgcagatccttcgcggccgcttatcagtcctcgttctgcacggtgaac-3′
(SEQ ID NO: 1760)
5′-attgcactagttgaaagaccccacctgtagg-3′
(SEQ ID NO: 1761)
5′-aatgctctagaatacgggtatccagg-3′
(SEQ ID NO: 1762)
5′ atagcgaattcgtaccgagggccaccatgg-3′
(SEQ ID NO: 1763)
5′-taggcctcccaccgtacacgcctaggtaccacgccttctgtatg-3′
(SEQ ID NO: 1764)
5′-taggcctcccaccgtacacgcctaggtacctctgcagtaaatgg-3′
(SEQ ID NO: 1765)
5′-taaggccatggtggctagc-3′
(SEQ ID NO: 1766)
5′-aataagtttaaactgccagaacatttctctgg-3′
(SEQ ID NO: 1767)
5′-atatagcggccgcttatcagtcctcgttctgcacgg-3′
6x FoxP3NFAT mCMV
(DNA)
(SEQ ID NO: 1768)
Agaacatttctctggcctaactggccggtaccggcttcattttttccatttactgcagaggcttcatt
ttttccatttactgcagaggcttcattttttccatttactgcagaggcttcattttttccatttactgcagaggctt
cattttttccatttactgcagaggcttcattttttccatttactgcagaactagttaggcgtgtacggtgggaggcc
tatataagcagagctcgtttagtgaaccgtcagatcgcctggagacgccatccacgctgttttgacctccatagaag
acaccgggaccgatccagcctcgagagacccaatgctagccaccatgg
(amino acids)
(SEQ ID NO: 1769)
RTFLWPNWPVPASFFPFTAEASFFPFTAEASFFPFTAEASFFPFTAEASFFPFTAEASFFPFTAELVR
RVRWEAYISRARLVNRQIAWRRHPRCFDLHRRHRDRSSLERPNASHHG
6x FoxP3NFAT mIL2P
(DNA)
(SEQ ID NO: 1770)
Agaacatttctctggcctaactggccggtaccggcttcattttttccatttactgcagaggcttcatt
ttttccatttactgcagaggcttcattttttccatttactgcagaggcttcattttttccatttactgcagaggctt
cattttttccatttactgcagaggcttcattttttccatttactgcagaactagtcattttgacacccccataatat
ttttccagaattaacagtataaattgcatctcttgttcaagagttccctatcactctctttaatcactactcacagt
aacctcaactcctgcctcgagagacccaatgctagccaccatgg
(amino acids)
(SEQ ID NO: 1771)
RTFLWPNWPVPASFFPFTAEASFFPFTAEASFFPFTAEASFFPFTAEASFFPFTAEASFFPFTAELVI
LTPP*YFSRINSINCISCSRVPYHSL*SLLTVTSTPASRDPMLATMX
6x FoxP3NFAT miniP
(DNA)
(SEQ ID NO: 1772)
Agaacatttctctggcctaactggccggtaccggcttcattttttccatttactgcagaggcttcatt
ttttccatttactgcagaggcttcattttttccatttactgcagaggcttcattttttccatttactgcagaggctt
cattttttccatttactgcagaggcttcattttttccatttactgcagaactagtagagggtatataatggaagctc
gacttccagctcgagagacccaatgctagccaccatgg
(amino acids)
(SEQ ID NO: 1773)
RTFLWPNWPVPASFFPFTAEASFFPFTAEASFFPFTAEASFFPFTAEASFFPFTAEASFFPFTAELVE
GI*WKLDFQLERPNASHHG
6x IL2NFAT mCMV
(DNA)
(SEQ ID NO: 1774)
Agaacatttctctggcctaactggccggtaccggaggaaaaactgtttcatacagaaggcgtggagga
aaaactgtttcatacagaaggcgtggaggaaaaactgtttcatacagaaggcgtggaggaaaaactgtttcatacag
aaggcgtggaggaaaaactgtttcatacagaaggcgtggaggaaaaactgtttcatacagaaggcgtactagttagg
cgtgtacggtgggaggcctatataagcagagctcgtttagtgaaccgtcagatcgcctggagacgccatccacgctg
ttttgacctccatagaagacaccgggaccgatccagcctcgagagacccaatgctagccaccatgg
(amino acids)
(SEQ ID NO: 1775)
RTFLWPNWPVPEEKLFHTEGVEEKLFHTEGVEEKLFHTEGVEEKLFHTEGVEEKLFHTEGVEEKLFHT
EGVLVRRVRWEAYISRARLVNRQIAWRRHPRCFDLHRRHRDRSSLERPNASHHG
6x IL2NFAT mIL2P
(DNA)
(SEQ ID NO: 1776)
Agaacatttctctggcctaactggccggtaccggaggaaaaactgtttcatacagaaggcgtggagga
aaaactgtttcatacagaaggcgtggaggaaaaactgtttcatacagaaggcgtggaggaaaaactgtttcatacag
aaggcgtggaggaaaaactgtttcatacagaaggcgtggaggaaaaactgtttcatacagaaggcgtactagtcatt
ttgacacccccataatatttttccagaattaacagtataaattgcatctcttgttcaagagttccctatcactctct
ttaatcactactcacagtaacctcaactcctgcctcgagagacccaatgctagccaccatgg
(amino acids)
(SEQ ID NO: 1777)
RTFLWPNWPVPEEKLFHTEGVEEKLFHTEGVEEKLFHTEGVEEKLFHTEGVEEKLFHTEGVEEKLFHT
EGVLVILTPP*YFSRINSINCISCSRVPYHSL*SLLTVTSTPASRDPMLATMX
6x IL2NFAT miniP
(DNA)
(SEQ ID NO: 1778)
Agaacatttctctggcctaactggccggtaccggaggaaaaactgtttcatacagaaggcgtggagga
aaaactgtttcatacagaaggcgtggaggaaaaactgtttcatacagaaggcgtggaggaaaaactgtttcatacag
aaggcgtggaggaaaaactgtttcatacagaaggcgtggaggaaaaactgtttcatacagaaggcgtactagtagag
ggtatataatggaagctcgacttccagctcgagagacccaatgctagccaccatgg
(amino acids)
(SEQ ID NO: 1779)
RTFLWPNWPVPEEKLFHTEGVEEKLFHTEGVEEKLFHTEGVEEKLFHTEGVEEKLFHTEGVEEKLFHT
EGVLVEGI*WKLDFQLERPNASHHG
Human NME1
(DNA)
(SEQ ID NO: 1780)
atggccaactgtgagcgtaccttcattgcgatcaaaccagatggggtccagcggggtcttgtgggagagattatcaa
gcgttttgagcagaaaggattccgccttgttggtctgaaattcatgcaagcttccgaagatcttctcaaggaacact
acgttgacctgaaggaccgtccattctttgccggcctggtgaaatacatgcactcagggccggtagttgccatggtc
tgggaggggctgaatgtggtgaagacgggccgagtcatgctcggggagaccaaccctgcagactccaagcctgggac
catccgtggagacttctgcatacaagttggcaggaacattatacatggcagtgattctgtggagagtgcagagaagg
agatcggcttgtggtttcaccctgaggaactggtagattacacgagctgtgctcagaactggatctatgaatga
(amino acids)
(SEQ ID NO: 1781)
MANCERTFIAIKPDGVQRGLVGEIIKRFEQKGFRLVGLKFMQASEDLLKEHYVDLKDRPFFAGLVKYMHSGPVVAMV
WEGLNVVKTGRVMLGETNPADSKPGTIRGDFCIQVGRNIIHGSDSVESAEKEIGLWFHPEELVDYTSCAQNWIYE-
Human NME7
(DNA)
(SEQ ID NO: 1782)
atgaatcatagtgaaagattcgttttcattgcagagtggtatgatccaaatgcttcacttcttcgacgttatgagct
tttattttacccaggggatggatctgttgaaatgcatgatgtaaagaatcatcgcacctttttaaagcggaccaaat
atgataacctgcacttggaagatttatttataggcaacaaagtgaatgtcttttctcgacaactggtattaattgac
tatggggatcaatatacagctcgccagctgggcagtaggaaagaaaaaacgctagccctaattaaaccagatgcaat
atcaaaggctggagaaataattgaaataataaacaaagctggatttactataaccaaactcaaaatgatgatgcttt
caaggaaagaagcattggattttcatgtagatcaccagtcaagaccctttttcaatgagctgatccagtttattaca
actggtcctattattgccatggagattttaagagatgatgctatatgtgaatggaaaagactgctgggacctgcaaa
ctctggagtggcacgcacagatgcttctgaaagcattagagccctctttggaacagatggcataagaaatgcagcgc
atggccctgattcttttgcttctgcggccagagaaatggagttgttttttccttcaagtggaggttgtgggccggca
aacactgctaaatttactaattgtacctgttgcattgttaaaccccatgctgtcagtgaaggactgttgggaaagat
cctgatggctatccgagatgcaggttttgaaatctcagctatgcagatgttcaatatggatcgggttaatgttgagg
aattctatgaagtttataaaggagtagtgaccgaatatcatgacatggtgacagaaatgtattctggcccttgtgta
gcaatggagattcaacagaataatgctacaaagacatttcgagaattttgtggacctgctgatcctgaaattgcccg
gcatttacgccctggaactctcagagcaatctttggtaaaactaagatccagaatgctgttcactgtactgatctgc
cagaggatggcctattagaggttcaatacttcttcaagatcttggataattag
(amino acids)
(SEQ ID NO: 1783)
MNHSERFVFIAEWYDPNASLLRRYELLFYPGDGSVEMHDVKNHRTFLKRTKYDNLHLEDLFIGNKVNVFSRQLVLID
YGDQYTARQLGSRKEKTLALIKPDAISKAGEITEIINKAGFTITKLKMMMLSRKEALDFHVDHQSRPFFNELIQFIT
TGPIIAMEILRDDAICEWKRLLGPANSGVARTDASESIRALFGTDGIRNAAHGPDSFASAAREMELFFPSSGGCGPA
NTAKFTNCTCCIVKPHAVSEGLLGKILMAIRDAGFEISAMQMFNMDRVNVEEFYEVYKGVVTEYHDMVTEMYSGPCV
AMEIQQNNATKTFREFCGPADPEIARHLRPGTLRAIFGKTKIQNAVHCTDLPEDGLLEVQYFFKILDN-

[0773] Those skilled in the art will recognize, or be able to ascertain using no more than routine experimentation, many equivalents to the specific embodiments of the invention specifically described herein.

The application's sequence listing, which the Patent Office published only in electronic form, follows.

SEQUENCE LISTING (1790 sequences)

SEQ ID NO: 1 - protein, 1255 aa, Homo sapiens
MTPGTQSPFFLLLLLTVLTVVTGSGHASSTPGGEKETSATQRSSVPSSTEKNAVSMTSSVLSSHSPGSGSSTTQGQDVTLAPATEPASGSAATWGQDVTSVPVTRPALGSTTPPAHDVTSAPDNKPAPGSTAPPAHGVTSAPDTRPAPGSTAPPAHGVTSAPDTRPAPGSTAPPAHGVTSAPDTRPAPGSTAPPAHGVTSAPDTRPAPGSTAPPAHGVTSAPDTRPAPGSTAPPAHGVTSAPDTRPAPGSTAPPAHGVTSAPDTRPAPGSTAPPAHGVTSAPDTRPAPGSTAPPAHGVTSAPDTRPAPGSTAPPAHGVTSAPDTRPAPGSTAPPAHGVTSAPDTRPAPGSTAPPAHGVTSAPDTRPAPGSTAPPAHGVTSAPDTRPAPGSTAPPAHGVTSAPDTRPAPGSTAPPAHGVTSAPDTRPAPGSTAPPAHGVTSAPDTRPAPGSTAPPAHGVTSAPDTRPAPGSTAPPAHGVTSAPDTRPAPGSTAPPAHGVTSAPDTRPAPGSTAPPAHGVTSAPDTRPAPGSTAPPAHGVTSAPDTRPAPGSTAPPAHGVTSAPDTRPAPGSTAPPAHGVTSAPDTRPAPGSTAPPAHGVTSAPDTRPAPGSTAPPAHGVTSAPDTRPAPGSTAPPAHGVTSAPDTRPAPGSTAPPAHGVTSAPDTRPAPGSTAPPAHGVTSAPDTRPAPGSTAPPAHGVTSAPDTRPAPGSTAPPAHGVTSAPDTRPAPGSTAPPAHGVTSAPDTRPAPGSTAPPAHGVTSAPDTRPAPGSTAPPAHGVTSAPDTRPAPGSTAPPAHGVTSAPDTRPAPGSTAPPAHGVTSAPDTRPAPGSTAPPAHGVTSAPDTRPAPGSTAPPAHGVTSAPDTRPAPGSTAPPAHGVTSAPDTRPAPGSTAPPAHGVTSAPDTRPAPGSTAPPAHGVTSAPDTRPAPGSTAPPAHGVTSAPDNRPALGSTAPPVHNVTSASGSASGSASTLVHNGTSARATTTPASKSTPFSIPSHHSDTPTTLASHSTKTDASSTHHSSVPPLTSSNHSTSPQLSTGVSFFFLSFHISNLQFNSSLEDPSTDYYQELQRDISEMFLQIYKQGGFLGLSNIKFRPGSVVVQLTLAFREGTINVHDVETQFNQYKTEAASRYNLTISDVSVSDVPFPFSAQSGAGVPGWGIALLVLVCVLVALAIVYLIALAVCQCRRKNYGQLDIFPARDTYHPMSEYPTYHTHGRYVPPSSTDRSPYEKVSAGNGGSSLSYTNPAVAAASANL

SEQ ID NO: 2 - protein, 45 aa, Artificial Sequence
  PSMGFR sequence
GTINVHDVETQFNQYKTEAASRYNLTISDVSVSDVPFPFSAQSGA

SEQ ID NO: 3 - protein, 35 aa, Artificial Sequence
  N-10 peptide
QFNQYKTEAASRYNLTISDVSVSDVPFPFSAQSGA

SEQ ID NO: 4 - protein, 26 aa, Artificial Sequence
  N-19 peptide
ASRYNLTISDVSVSDVPFPFSAQSGA

SEQ ID NO: 5 - protein, 22 aa, Artificial Sequence
  N-23 peptide
NLTISDVSVSDVPFPFSAQSGA

SEQ ID NO: 6 - protein, 19 aa, Artificial Sequence
  N-26 peptide
ISDVSVSDVPFPFSAQSGA

SEQ ID NO: 7 - protein, 15 aa, Artificial Sequence
  N-30 peptide
SVSDVPFPFSAQSGA

SEQ ID NO: 8 - protein, 30 aa, Artificial Sequence
  N-10/C-5 peptide
QFNQYKTEAASRYNLTISDVSVSDVPFPFS

SEQ ID NO: 9 - protein, 21 aa, Artificial Sequence
  N-19/C-5 peptide
ASRYNLTISDVSVSDVPFPFS

SEQ ID NO: 10 - protein, 9 aa, Artificial Sequence
  N-36 peptide
FPFSAQSGA

SEQ ID NO: 11 - skipped

SEQ ID NO: 12 - DNA, 366 bp, Artificial Sequence
  Mouse E6 Heavy chain variable region sequence
gaggtgaaggtggtggagtctgggggagacttagtgaagcctggagggtccctgaaactctcctgtgtagtctctggattcactttcagtagatatggcatgtcttgggttcgccagactccaggcaagaggctggagtgggtcgcaaccattagtggtggcggtacttacatctactatccagacagtgtgaaggggcgattcaccatctccagagacaatgccaagaacaccctgtacctgcaaatgagcagtctgaagtctgaggacacagccatgtatcactgtacaagggataactacggtaggaactacgactacggtatggactactggggtcaaggaacctcagtcaccgtctcctca

SEQ ID NO: 13 - protein, 122 aa, Artificial Sequence
  Mouse E6 Heavy chain variable region sequence
EVKVVESGGDLVKPGGSLKLSCVVSGFTFSRYGMSWVRQTPGKRLEWVATISGGGTYIYYPDSVKGRFTISRDNAKNTLYLQMSSLKSEDTAMYHCTRDNYGRNYDYGMDYWGQGTSVTVSS

SEQ ID NO: 14 - DNA, 75 bp, Artificial Sequence
  Mouse E6 heavy chain variable framework region 1 (FWR1) sequence
gaggtgaaggtggtggagtctgggggagacttagtgaagcctggagggtccctgaaactctcctgtgtagtctct

SEQ ID NO: 15 - protein, 30 aa, Artificial Sequence
  Mouse E6 heavy chain variable framework region 1 (FWR1) sequence
EVKVVESGGDLVKPGGSLKLSCVVSGFTFS

SEQ ID NO: 16 - DNA, 30 bp, Artificial Sequence
  Mouse E6 heavy chain variable complementarity determining regions 1 (CDR1) sequence
ggattcactttcagtagatatggcatgtct

SEQ ID NO: 17 - protein, 5 aa, Artificial Sequence
  Mouse E6 heavy chain variable complementarity determining regions 1 (CDR1) sequence
RYGMS

SEQ ID NO: 18 - DNA, 42 bp, Artificial Sequence
  Mouse E6 heavy chain variable framework region 2 (FWR2) sequence
tgggttcgccagactccaggcaagaggctggagtgggtcgca

SEQ ID NO: 19 - protein, 14 aa, Artificial Sequence
  Mouse E6 heavy chain variable framework region 2 (FWR2) sequence
WVRQTPGKRLEWVA

SEQ ID NO: 20 - DNA, 51 bp, Artificial Sequence
  Mouse E6 heavy chain variable complementarity determining regions 2 (CDR2) sequence
accattagtggtggcggtacttacatctactatccagacagtgtgaagggg

SEQ ID NO: 21 - protein, 17 aa, Artificial Sequence
  Mouse E6 heavy chain variable complementarity determining regions 2 (CDR2) sequence
TISGGGTYIYYPDSVKG

SEQ ID NO: 22 - DNA, 96 bp, Artificial Sequence
  Mouse E6 heavy chain variable framework region 3 (FWR3) acid sequence
cgattcaccatctccagagacaatgccaagaacaccctgtacctgcaaatgagcagtctgaagtctgaggacacagccatgtatcactgtacaagg

SEQ ID NO: 23 - protein, 32 aa, Artificial Sequence
  Mouse E6 heavy chain variable framework region 3 (FWR3) acid sequence
RFTISRDNAKNTLYLQMSSLKSEDTAMYHCTR

SEQ ID NO: 24 - DNA, 39 bp, Artificial Sequence
  Mouse E6 heavy chain variable complementarity determining regions 3 (CDR3) sequence:
gataactacggtaggaactacgactacggtatggactac

SEQ ID NO: 25 - protein, 13 aa, Artificial Sequence
  Mouse E6 heavy chain variable complementarity determining regions 3 (CDR3) sequence:
DNYGRNYDYGMDY

SEQ ID NO: 26-37 - skipped (12 entries)

SEQ ID NO: 38 - DNA, 366 bp, Artificial Sequence
  Humanized E6 heavy chain variable region sequence from IGHV3-21*03
gaggtgcagctggtggagtctgggggaggcctggtcaagcctggggggtccctgagactctcctgtgcagcctctggattcaccttcagtaggtatggcatgagctgggtccgccaggctccagggaagaggctggagtgggtctcaaccattagtggcggaggcacctacatatactacccagactcagtgaagggccgattcaccatctccagagacaacgccaagaacaccctgtatctgcaaatgaacagcctgagagccgaggacacggctgtgtattactgtaccagagataactatggccgcaactatgattatggcatggattattggggccagggcaccctggtgaccgtgagcagc

SEQ ID NO: 39 - protein, 122 aa, Artificial Sequence
  Humanized E6 heavy chain variable region sequence from IGHV3-21*03
EVQLVESGGGLVKPGGSLRLSCAASGFTFSRYGMSWVRQAPGKRLEWVSTISGGGTYIYYPDSVKGRFTISRDNAKNTLYLQMNSLRAEDTAVYYCTRDNYGRNYDYGMDYWGQGTLVTVSS

SEQ ID NO: 40 - DNA, 90 bp, Artificial Sequence
  Humanized E6 heavy chain variable framework region 1 (FWR1) acid sequence
gaggtgcagctggtggagtctgggggaggcctggtcaagcctggggggtccctgagactctcctgtgcagcctctggattcaccttcagt

SEQ ID NO: 41 - protein, 30 aa, Artificial Sequence
  Humanized E6 heavy chain variable framework region 1 (FWR1) acid sequence
EVQLVESGGGLVKPGGSLRLSCAASGFTFS

SEQ ID NO: 42 - DNA, 15 bp, Artificial Sequence
  Humanized E6 heavy chain variable complementarity determining regions 1 (CDR1) sequence
aggtatggcatgagc

SEQ ID NO: 43 - protein, 5 aa, Artificial Sequence
  Humanized E6 heavy chain variable complementarity determining regions 1 (CDR1) sequence
RYGMS

SEQ ID NO: 44 - DNA, 42 bp, Artificial Sequence
  Humanized E6 heavy chain variable framework region 2 (FWR2) acid sequence
tgggtccgccaggctccagggaagaggctggagtgggtctca

SEQ ID NO: 45 - protein, 14 aa, Artificial Sequence
  Humanized E6 heavy chain variable framework region 2 (FWR2) acid sequence
WVRQAPGKRLEWVS

SEQ ID NO: 46 - DNA, 51 bp, Artificial Sequence
  Humanized E6 heavy chain variable complementarity determining regions 2 (CDR2) sequence
accattagtggcggaggcacctacatatactacccagactcagtgaagggc

SEQ ID NO: 47 - protein, 17 aa, Artificial Sequence
  Humanized E6 heavy chain variable complementarity determining regions 2 (CDR2) sequence
TISGGGTYIYYPDSVKG

SEQ ID NO: 48 - DNA, 96 bp, Artificial Sequence
  Humanized E6 heavy chain variable framework region 3 (FWR3) acid sequence
cgattcaccatctccagagacaacgccaagaacaccctgtatctgcaaatgaacagcctgagagccgaggacacggctgtgtattactgtaccaga

SEQ ID NO: 49 - protein, 32 aa, Artificial Sequence
  Humanized E6 heavy chain variable framework region 3 (FWR3) acid sequence
RFTISRDNAKNTLYLQMNSLRAEDTAVYYCTR

SEQ ID NO: 50 - DNA, 39 bp, Artificial Sequence
  Humanized E6 heavy chain variable complementarity determining regions 3 (CDR3) sequence
gataactatggccgcaactatgattatggcatggattat

SEQ ID NO: 51 - protein, 13 aa, Artificial Sequence
  Humanized E6 heavy chain variable complementarity determining regions 3 (CDR3) sequence
DNYGRNYDYGMDY

SEQ ID NO: 52 - DNA, 1442 bp, Artificial Sequence
  Humanized E6 IgG2 heavy chain synthesized by Genescript
gaattctaagcttgggccaccatggaactggggctccgctgggttttccttgttgctattttagaaggtgtccagtgtgaggtgcagctggtggagtctgggggaggcctggtcaagcctggggggtccctgagactctcctgtgcagcctctggattcaccttcagtaggtatggcatgagctgggtccgccaggctccagggaagaggctggagtgggtctcaaccattagtggcggaggcacctacatatactacccagactcagtgaagggccgattcaccatctccagagacaacgccaagaacaccctgtatctgcaaatgaacagcctgagagccgaggacacggctgtgtattactgtaccagagataactatggccgcaactatgattatggcatggattattggggccagggcaccctggtgaccgtgagcagcgcctccaccaagggcccatcggtcttccccctggcgccctgctccaggagcacctccgagagcacagccgccctgggctgcctggtcaaggactacttccccgaaccggtgacggtgtcgtggaactcaggcgctctgaccagcggcgtgcacaccttcccagctgtcctacagtcctcaggactctactccctcagcagcgtggtgaccgtgccctccagcaacttcggcacccagacctacacctgcaacgtagatcacaagcccagcaacaccaaggtggacaagacagttgagcgcaaatgttgtgtcgagtgcccaccgtgcccagcaccacctgtggcaggaccgtcagtcttcctcttccccccaaaacccaaggacaccctcatgatctcccggacccctgaggtcacgtgcgtggtggtggacgtgagccacgaagaccccgaggtccagttcaactggtacgtggacggcgtggaggtgcataatgccaagacaaagccacgggaggagcagttcaacagcacgttccgtgtggtcagcgtcctcaccgttgtgcaccaggactggctgaacggcaaggagtacaagtgcaaggtctccaacaaaggcctcccagcccccatcgagaaaaccatctccaaaaccaaagggcagccccgagaaccacaggtgtacaccctgcccccatcccgggaggagatgaccaagaaccaggtcagcctgacctgcctggtcaaaggcttctaccccagcgacatcgccgtggagtgggagagcaatgggcagccggagaacaactacaagaccacacctcccatgctggactccgacggctccttcttcctctacagcaagctcaccgtggacaagagcaggtggcagcaggggaacgtcttctcatgctccgtgatgcatgaggctctgcacaaccactacacgcagaagagcctctccctgtctccgggtaaatagtaagtttaaactctaga

SEQ ID NO: 53 - protein, 477 aa, Artificial Sequence
  Humanized E6 IgG2 heavy chain synthesized by Genescript
  misc_feature (477)..(477): Xaa can be any naturally occurring amino acid
EFAWATMELGLRWVFLVAILEGVQCEVQLVESGGGLVKPGGSLRLSCAASGFTFSRYGMSWVRQAPGKRLEWVSTISGGGTYIYYPDSVKGRFTISRDNAKNTLYLQMNSLRAEDTAVYYCTRDNYGRNYDYGMDYWGQGTLVTVSSASTKGPSVFPLAPCSRSTSESTAALGCLVKDYFPEPVTVSWNSGALTSGVHTFPAVLQSSGLYSLSSVVTVPSSNFGTQTYTCNVDHKPSNTKVDKTVERKCCVECPPCPAPPVAGPSVFLFPPKPKDTLMISRTPEVTCVVVDVSHEDPEVQFNWYVDGVEVHNAKTKPREEQFNSTFRVVSVLTVVHQDWLNGKEYKCKVSNKGLPAPIEKTISKTKGQPREPQVYTLPPSREEMTKNQVSLTCLVKGFYPSDIAVEWESNGQPENNYKTTPPMLDSDGSFFLYSKLTVDKSRWQQGNVFSCSVMHEALHNHYTQKSLSLSPGKVTLX

SEQ ID NO: 54 - DNA, 981 bp, Artificial Sequence
  Human IgG2 heavy chain constant region sequence
gcctccaccaagggcccatcggtcttccccctggcgccctgctccaggagcacctccgagagcacagccgccctgggctgcctggtcaaggactacttccccgaaccggtgacggtgtcgtggaactcaggcgctctgaccagcggcgtgcacaccttcccagctgtcctacagtcctcaggactctactccctcagcagcgtggtgaccgtgccctccagcaacttcggcacccagacctacacctgcaacgtagatcacaagcccagcaacaccaaggtggacaagacagttgagcgcaaatgttgtgtcgagtgcccaccgtgcccagcaccacctgtggcaggaccgtcagtcttcctcttccccccaaaacccaaggacaccctcatgatctcccggacccctgaggtcacgtgcgtggtggtggacgtgagccacgaagaccccgaggtccagttcaactggtacgtggacggcgtggaggtgcataatgccaagacaaagccacgggaggagcagttcaacagcacgttccgtgtggtcagcgtcctcaccgttgtgcaccaggactggctgaacggcaaggagtacaagtgcaaggtctccaacaaaggcctcccagcccccatcgagaaaaccatctccaaaaccaaagggcagccccgagaaccacaggtgtacaccctgcccccatcccgggaggagatgaccaagaaccaggtcagcctgacctgcctggtcaaaggcttctaccccagcgacatcgccgtggagtgggagagcaatgggcagccggagaacaactacaagaccacacctcccatgctggactccgacggctccttcttcctctacagcaagctcaccgtggacaagagcaggtggcagcaggggaacgtcttctcatgctccgtgatgcatgaggctctgcacaaccactacacgcagaagagcctctccctgtctccgggtaaatag

SEQ ID NO: 55 - protein, 326 aa, Artificial Sequence
  Human IgG2 heavy chain constant region sequence
ASTKGPSVFPLAPCSRSTSESTAALGCLVKDYFPEPVTVSWNSGALTSGVHTFPAVLQSSGLYSLSSVVTVPSSNFGTQTYTCNVDHKPSNTKVDKTVERKCCVECPPCPAPPVAGPSVFLFPPKPKDTLMISRTPEVTCVVVDVSHEDPEVQFNWYVDGVEVHNAKTKPREEQFNSTFRVVSVLTVVHQDWLNGKEYKCKVSNKGLPAPIEKTISKTKGQPREPQVYTLPPSREEMTKNQVSLTCLVKGFYPSDIAVEWESNGQPENNYKTTPPMLDSDGSFFLYSKLTVDKSRWQQGNVFSCSVMHEALHNHYTQKSLSLSPGK

SEQ ID NO: 56 - DNA, 1362 bp, Artificial Sequence
  Humanized E6 IgG1 heavy chain sequence
gaggtgcagctggtggagtctgggggaggcctggtcaagcctggggggtccctgagactctcctgtgcagcctctggattcaccttcagtaggtatggcatgagctgggtccgccaggctccagggaagaggctggagtgggtctcaaccattagtggcggaggcacctacatatactacccagactcagtgaagggccgattcaccatctccagagacaacgccaagaacccactgtatctgcaaatgaacagcctgagagccgaggacacggctgtgtattactgtcccagagataactatggccgcaactatgattatggcatggattattggggccagggcaccctggtgaccgtgagcagcgctagcaccaagggcccatcggtcttccccctggcaccctcctccaagagcacctctgggggcacagcggccctgggctgcctggtcaaggactacttccccgaaccggtgacggtgtcgtggaactcaggcgccctgaccagcggcgtgcacaccttcccggctgtcctacagtcctcaggactctactccctcagcagcgtggtgacagtgccctccagcagcttgggcacccagacctacatctgcaacgtgaatcacaagcccagcaacaccaaggtggacaagaaagttgagcccaaatcttgtgacaaaactcacacatgcccaccgtgcccagcacctgaactcctggggggaccgtcagtcttcctcttccccccaaaacccaaggacaccctcatgatctcccggacccctgaggtcacatgcgtggtggtggacgtgagccacgaagaccctgaggtcaagttcaactggtacgtggacggcgtggaggtgcataatgccaagacaaagccgcgggaggagcagtacaacagcacgtaccgtgtggtcagcgtcctcaccgtcctgcaccaggactggctgaatggcaaggagtacaagtgcaaggtctccaacaaagccctcccagcccccatcgagaaaaccatctccaaagccaaagggcagccccgagaaccacaggtgtacaccctgcccccatcccgggaggagatgaccaagaaccaggtcagcctgacctgcctggtcaaaggcttctatcccagcgacatcgccgtggagtgggagagcaatgggcagccggagaacaactacaagaccacgcctcccgtgctggactccgacggctccttcttcctctacagcaagctcaccgtggacaagagcaggtggcagcaggggaacgtcttctcatgctccgtgatgcatgaggctctgcacaaccactacacgcagaagagcctctccctgtctccgggtaaatgataa

SEQ ID NO: 57 - protein, 452 aa, Artificial Sequence
  Humanized E6 IgG1 heavy chain sequence
EVQLVESGGGLVKPGGSLRLSCAASGFTFSRYGMSWVRQAPGKRLEWVSTISGGGTYIYYPDSVKGRFTISRDNAKNPLYLQMNSLRAEDTAVYYCPRDNYGRNYDYGMDYWGQGTLVTVSSASTKGPSVFPLAPSSKSTSGGTAALGCLVKDYFPEPVTVSWNSGALTSGVHTFPAVLQSSGLYSLSSVVTVPSSSLGTQTYICNVNHKPSNTKVDKKVEPKSCDKTHTCPPCPAPELLGGPSVFLFPPKPKDTLMISRTPEVTCVVVDVSHEDPEVKFNWYVDGVEVHNAKTKPREEQYNSTYRVVSVLTVLHQDWLNGKEYKCKVSNKALPAPIEKTISKAKGQPREPQVYTLPPSREEMTKNQVSLTCLVKGFYPSDIAVEWESNGQPENNYKTTPPVLDSDGSFFLYSKLTVDKSRWQQGNVFSCSVMHEALHNHYTQKSLSLSPGK

SEQ ID NO: 58 - DNA, 996 bp, Artificial Sequence
  Human IgG1 heavy chain constant region sequence
gctagcaccaagggcccatcggtcttccccctggcaccctcctccaagagcacctctgggggcacagcggccctgggctgcctggtcaaggactacttccccgaaccggtgacggtgtcgtggaactcaggcgccctgaccagcggcgtgcacaccttcccggctgtcctacagtcctcaggactctactccctcagcagcgtggtgacagtgccctccagcagcttgggcacccagacctacatctgcaacgtgaatcacaagcccagcaacaccaaggtggacaagaaagttgagcccaaatcttgtgacaaaactcacacatgcccaccgtgcccagcacctgaactcctggggggaccgtcagtcttcctcttccccccaaaacccaaggacaccctcatgatctcccggacccctgaggtcacatgcgtggtggtggacgtgagccacgaagaccctgaggtcaagttcaactggtacgtggacggcgtggaggtgcataatgccaagacaaagccgcgggaggagcagtacaacagcacgtaccgtgtggtcagcgtcctcaccgtcctgcaccaggactggctgaatggcaaggagtacaagtgcaaggtctccaacaaagccctcccagcccccatcgagaaaaccatctccaaagccaaagggcagccccgagaaccacaggtgtacaccctgcccccatcccgggaggagatgaccaagaaccaggtcagcctgacctgcctggtcaaaggcttctatcccagcgacatcgccgtggagtgggagagcaatgggcagccggagaacaactacaagaccacgcctcccgtgctggactccgacggctccttcttcctctacagcaagctcaccgtggacaagagcaggtggcagcaggggaacgtcttctcatgctccgtgatgcatgaggctctgcacaaccactacacgcagaagagcctctccctgtctccgggtaaatgataa

SEQ ID NO: 59 - protein, 330 aa, Artificial Sequence
  Human IgG1 heavy chain constant region sequence
ASTKGPSVFPLAPSSKSTSGGTAALGCLVKDYFPEPVTVSWNSGALTSGVHTFPAVLQSSGLYSLSSVVTVPSSSLGTQTYICNVNHKPSNTKVDKKVEPKSCDKTHTCPPCPAPELLGGPSVFLFPPKPKDTLMISRTPEVTCVVVDVSHEDPEVKFNWYVDGVEVHNAKTKPREEQYNSTYRVVSVLTVLHQDWLNGKEYKCKVSNKALPAPIEKTISKAKGQPREPQVYTLPPSREEMTKNQVSLTCLVKGFYPSDIAVEWESNGQPENNYKTTPPVLDSDGSFFLYSKLTVDKSRWQQGNVFSCSVMHEALHNHYTQKSLSLSPGK

SEQ ID NO: 60-64 - skipped (5 entries)

SEQ ID NO: 65 - DNA, 318 bp, Artificial Sequence
  Mouse E6 Light Chain variable region sequence
caaattgttctcacccagtctccagcaatcatgtctgcatctccaggggaggaggtcaccctaacctgcagtgccacctcaagtgtaagttacatacactggttccagcagaggccaggcacttctcccaaactctggatttatagcacatccaacctggcttctggagtccctgttcgcttcagtggcagtggatatgggacctcttactctctcacaatcagccgaatggaggctgaagatgctgccacttattactgccagcaaaggagtagttccccattcacgttcggctcggggacaaagttggaaataaaa

SEQ ID NO: 66 - protein, 106 aa, Artificial Sequence
  Mouse E6 Light Chain variable region sequence
QIVLTQSPAIMSASPGEEVTLTCSATSSVSYIHWFQQRPGTSPKLWIYSTSNLASGVPVRFSGSGYGTSYSLTISRMEAEDAATYYCQQRSSSPFTFGSGTKLEIK

SEQ ID NO: 67 - DNA, 69 bp, Artificial Sequence
  Mouse E6 light chain variable framework region 1 (FWR1) sequence
caaattgttctcacccagtctccagcaatcatgtctgcatctccaggggaggaggtcaccctaacctgc

SEQ ID NO: 68 - protein, 23 aa, Artificial Sequence
  Mouse E6 light chain variable framework region 1 (FWR1) sequence
QIVLTQSPAIMSASPGEEVTLTC

SEQ ID NO: 69 - DNA, 30 bp, Artificial Sequence
  Mouse E6 light chain variable complementarity determining regions 1 (CDR1) sequence
agtgccacctcaagtgtaagttacatacac

SEQ ID NO: 70 - protein, 10 aa, Artificial Sequence
  Mouse E6 light chain variable complementarity determining regions 1 (CDR1) sequence
SATSSVSYIH

SEQ ID NO: 71 - DNA, 45 bp, Artificial Sequence
  Mouse E6 light chain variable framework region 2 (FWR2) sequence
tggttccagcagaggccaggcacttctcccaaactctggatttat

SEQ ID NO: 72 - protein, 15 aa, Artificial Sequence
  Mouse E6 light chain variable framework region 2 (FWR2) sequence
WFQQRPGTSPKLWIY

SEQ ID NO: 73 - DNA, 21 bp, Artificial Sequence
  Mouse E6 light chain variable complementarity determining regions 2 (CDR2) sequence
agcacatccaacctggcttct

SEQ ID NO: 74 - protein, 7 aa, Artificial Sequence
  Mouse E6 light chain variable complementarity determining regions 2 (CDR2) sequence
STSNLAS

SEQ ID NO: 75 - DNA, 96 bp, Artificial Sequence
  Mouse E6 light chain variable framework region 3 (FWR3) sequence
ggagtccctgttcgcttcagtggcagtggatatgggacctcttactctctcacaatcagccgaatggaggctgaagatgctgccacttattactgc

SEQ ID NO: 76 - protein, 32 aa, Artificial Sequence
  Mouse E6 light chain variable framework region 3 (FWR3) sequence
GVPVRFSGSGYGTSYSLTISRMEAEDAATYYC

SEQ ID NO: 77 - DNA, 27 bp, Artificial Sequence
  Mouse E6 light chain variable complementarity determining regions 3 (CDR3) sequence
cagcaaaggagtagttccccattcacg

SEQ ID NO: 78 - protein, 9 aa, Artificial Sequence
  Mouse E6 light chain variable complementarity determining regions 3 (CDR3) sequence
QQRSSSPFT

SEQ ID NO: 79-92 - skipped (14 entries)

SEQ ID NO: 93 - DNA, 318 bp, Artificial Sequence
  Humanized E6 light chain variable region sequence from IGKV3-11*02
gaaattgtgttgacacagtctccagccaccctgtctttgtctccaggggaaagagccaccctcacctgcagcgccaccagcagtgttagctacatccactggtaccaacagaggcctggccagagccccaggctcctcatctatagcacctccaacctggccagcggcatcccagccaggttcagtggcagtgggtctgggagcgactacactctcaccatcagcagcctagagcctgaagattttgcagtttattactgtcagcagcgtagcagctcccctttcacctttggcagcggcaccaaagtggaaattaaa

SEQ ID NO: 94 - protein, 106 aa, Artificial Sequence
  Humanized E6 light chain variable region sequence from IGKV3-11*02
EIVLTQSPATLSLSPGERATLTCSATSSVSYIHWYQQRPGQSPRLLIYSTSNLASGIPARFSGSGSGSDYTLTISSLEPEDFAVYYCQQRSSSPFTFGSGTKVEIK

SEQ ID NO: 95 - DNA, 69 bp, Artificial Sequence
  Humanized E6 light chain variable framework region 1 (FWR1) acid sequence
gaaattgtgttgacacagtctccagccaccctgtctttgtctccaggggaaagagccaccctcacctgc

SEQ ID NO: 96 - protein, 23 aa, Artificial Sequence
  Humanized E6 light chain variable framework region 1 (FWR1) acid sequence
EIVLTQSPATLSLSPGERATLTC

SEQ ID NO: 97 - DNA, 30 bp, Artificial Sequence
  Humanized E6 light chain variable complementarity determining regions 1 (CDR1) sequence
agcgccaccagcagtgttagctacatccac

SEQ ID NO: 98 - protein, 10 aa, Artificial Sequence
  Humanized E6 light chain variable complementarity determining regions 1 (CDR1) sequence
SATSSVSYIH

SEQ ID NO: 99 - DNA, 45 bp, Artificial Sequence
  Humanized E6 heavy light variable framework region 2 (FWR2) acid sequence
tggtaccaacagaggcctggccagagccccaggctcctcatctat

SEQ ID NO: 100 - protein, 15 aa, Artificial Sequence
  Humanized E6 heavy light variable framework region 2 (FWR2) acid sequence
WYQQRPGQSPRLLIY

SEQ ID NO: 101 - DNA, 21 bp, Artificial Sequence
  Humanized E6 light chain variable complementarity determining regions 2 (CDR2) sequence
agcacctccaacctggccagc

SEQ ID NO: 102 - protein, 7 aa, Artificial Sequence
  Humanized E6 light chain variable complementarity determining regions 2 (CDR2) sequence
STSNLAS

SEQ ID NO: 103 - DNA, 96 bp, Artificial Sequence
  Humanized E6 light chain variable framework region 3 (FWR3) acid sequence
ggcatcccagccaggttcagtggcagtgggtctgggagcgactacactctcaccatcagcagcctagagcctgaagattttgcagtttattactgt

SEQ ID NO: 104 - protein, 32 aa, Artificial Sequence
  Humanized E6 light chain variable framework region 3 (FWR3) acid sequence
GIPARFSGSGSGSDYTLTISSLEPEDFAVYYC

SEQ ID NO: 105 - DNA, 27 bp, Artificial Sequence
  Humanized E6 light chain variable complementarity determining regions 3 (CDR3) sequence
cagcagcgtagcagctcccctttcacc

SEQ ID NO: 106 - protein, 9 aa, Artificial Sequence
  Humanized E6 light chain variable complementarity determining regions 3 (CDR3) sequence
QQRSSSPFT

SEQ ID NO: 107 - DNA, 740 bp, Artificial Sequence
  Humanized E6 Kappa light chain synthesized by Genescript
gaattctaagcttgggccaccatggaagccccagcgcagcttctcttcctcctgctactctggctcccagataccactggagaaattgtgttgacacagtctccagccaccctgtctttgtctccaggggaaagagccaccctcacctgcagcgccaccagcagtgttagctacatccactggtaccaacagaggcctggccagagccccaggctcctcatctatagcacctccaacctggccagcggcatcccagccaggttcagtggcagtgggtctgggagcgactacactctcaccatcagcagcctagagcctgaagattttgcagtttattactgtcagcagcgtagcagctcccctttcacctttggcagcggcaccaaagtggaaattaaaaggacggtggctgcaccatctgtcttcatcttcccgccatctgatgagcagttgaaatctggaactgcctctgttgtgtgcctgctgaataacttctatcccagagaggccaaagtacagtggaaggtggataacgccctccaatcgggtaactcccaggagagtgtcacagagcaggacagcaaggacagcacctacagcctcagcagcaccctgacgctgagcaaagcagactacgagaaacacaaagtctacgcctgcgaagtcacccatcagggcctgagctcgcccgtcacaaagagcttcaacaggggagagtgttagtaagtttaaactctaga

SEQ ID NO: 108 - protein, 243 aa, Artificial Sequence
  Humanized E6 Kappa light chain synthesized by Genescript
  misc_feature (243)..(243): Xaa can be any naturally occurring amino acid
EFAWATMEAPAQLLFLLLLWLPDTTGEIVLTQSPATLSLSPGERATLTCSATSSVSYIHWYQQRPGQSPRLLIYSTSNLASGIPARFSGSGSGSDYTLTISSLEPEDFAVYYCQQRSSSPFTFGSGTKVEIKRTVAAPSVFIFPPSDEQLKSGTASVVCLLNNFYPREAKVQWKVDNALQSGNSQESVTEQDSKDSTYSLSSTLTLSKADYEKHKVYACEVTHQGLSSPVTKSFNRGECVTLX

SEQ ID NO: 109 - DNA, 324 bp, Artificial Sequence
  Human Kappa light chain constant region sequence
aggacggtggctgcaccatctgtcttcatcttcccgccatctgatgagcagttgaaatctggaactgcctctgttgtgtgcctgctgaataacttctatcccagagaggccaaagtacagtggaaggtggataacgccctccaatcgggtaactcccaggagagtgtcacagagcaggacagcaaggacagcacctacagcctcagcagcaccctgacgctgagcaaagcagactacgagaaacacaaagtctacgcctgcgaagtcacccatcagggcctgagctcgcccgtcacaaagagcttcaacaggggagagtgttag

SEQ ID NO: 110 - protein, 107 aa, Artificial Sequence [sequence omitted]

SEQ ID NO: 111 - DNA, 642 bp, Artificial Sequence
  Humanized E6 lambda light chain sequence
gaaattgtgttgacacagtctccagccaccctgtctttgtctccaggggaaagagccaccctcacctgcagcgccaccagcagtgttagctacatccactggtaccaacagaggcctggccagagccccaggctcctcatctatagcacctccaacctggccagcggcatcccagccaggttcagtggcagtgggtctgggagcgactacactctcaccatcagcagcctagagcctgaagattttgcagtttattactgtcagcagcgtagcagctcccctttcacctttggcagcggcaccaaagtggaaattaaaggtcagcccaaggctgccccctcggtcactctgttcccgccctcctctgaggagcttcaagccaacaaggccacactggtgtgtctcataagtgacttctacccgggagccgtgacagtggcctggaaggcagatagcagccccgtcaaggcgggagtggagaccaccacaccctccaaacaaagcaacaacaagtacgcggccagcagctatctgagcctgacgcctgagcagtggaagtcccacagaagctacagctgccaggtcacgcatgaagggagcaccgtggagaagacagtggcccctacagaatgttcatagtaa

SEQ ID NO: 112 - protein, 212 aa, Artificial Sequence
  Humanized E6 lambda light chain sequence
EIVLTQSPATLSLSPGERATLTCSATSSVSYIHWYQQRPGQSPRLLIYSTSNLASGIPARFSGSGSGSDYTLTISSLEPEDFAVYYCQQRSSSPFTFGSGTKVEIKGQPKAAPSVTLFPPSSEELQANKATLVCLISDFYPGAVTVAWKADSSPVKAGVETTTPSKQSNNKYAASSYLSLTPEQWKSHRSYSCQVTHEGSTVEKTVAPTECS

SEQ ID NO: 113 - DNA, 324 bp, Artificial Sequence
  Humanized lambda light chain constant region sequence
ggtcagcccaaggctgccccctcggtcactctgttcccgccctcctctgaggagcttcaagccaacaaggccacactggtgtgtctcataagtgacttctacccgggagccgtgacagtggcctggaaggcagatagcagccccgtcaaggcgggagtggagaccaccacaccctccaaacaaagcaacaacaagtacgcggccagcagctatctgagcctgacgcctgagcagtggaagtcccacagaagctacagctgccaggtcacgcatgaagggagcaccgtggagaagacagtggcccctacagaatgttcatagtaa

SEQ ID NO: 114 - protein, 106 aa, Artificial Sequence
  Humanized lambda light chain constant region sequence
GQPKAAPSVTLFPPSSEELQANKATLVCLISDFYPGAVTVAWKADSSPVKAGVETTTPSKQSNNKYAASSYLSLTPEQWKSHRSYSCQVTHEGSTVEKTVAPTECS

SEQ ID NO: 115-117 - skipped (3 entries)

SEQ ID NO: 118 - DNA, 390 bp, Artificial Sequence
  Mouse C2 heavy chain variable region sequence
gaggtccagctggaggagtcagggggaggcttagtgaagcctggagggtccctgaaactctcctgtgcagcctctggattcactttcagtggctatgccatgtcttgggttcgccagactccggagaagaggctggagtgggtcgcaaccattagtagtggtggtacttatatctactatccagacagtgtgaaggggcgattcaccatctccagagacaatgccaagaacaccctgtacctgcaaatgagcagtctgaggtctgaggacacggccatgtattactgtgcaagacttgggggggataattactacgaatacttcgatgtctggggcgcagggaccacggtcaccgtctcctccgccaaaacgacacccccatctgtctat

SEQ ID NO: 119 - protein, 130 aa, Artificial Sequence
  Mouse C2 heavy chain variable region sequence
EVQLEESGGGLVKPGGSLKLSCAASGFTFSGYAMSWVRQTPEKRLEWVATISSGGTYIYYPDSVKGRFTISRDNAKNTLYLQMSSLRSEDTAMYYCARLGGDNYYEYFDVWGAGTTVTVSSAKTTPPSVY

SEQ ID NO: 120 - DNA, 90 bp, Artificial Sequence
  Mouse C2 heavy chain variable framework region 1 (FWR1) sequence
gaggtccagctggaggagtcagggggaggcttagtgaagcctggagggtccctgaaactctcctgtgcagcctctggattcactttcagt

SEQ ID NO: 121 - protein, 30 aa, Artificial Sequence
  Mouse C2 heavy chain variable framework region 1 (FWR1) sequence
EVQLEESGGGLVKPGGSLKLSCAASGFTFS

SEQ ID NO: 122 - DNA, 15 bp, Artificial Sequence
  Mouse C2 heavy chain variable complementarity determining regions 1 (CDR1) sequence
ggctatgccatgtct

SEQ ID NO: 123 - protein, 5 aa, Artificial Sequence
  Mouse C2 heavy chain variable complementarity determining regions 1 (CDR1) sequence
GYAMS

SEQ ID NO: 124 - DNA, 42 bp, Artificial Sequence
  Mouse C2 heavy chain variable framework region 2 (FWR2) sequence
tgggttcgccagactccggagaagaggctggagtgggtcgca

SEQ ID NO: 125 - protein, 14 aa, Artificial Sequence
  Mouse C2 heavy chain variable framework region 2 (FWR2) sequence
WVRQTPEKRLEWVA

SEQ ID NO: 126 - DNA, 51 bp, Artificial Sequence
  Mouse C2 heavy chain variable complementarity determining regions 2 (CDR2) sequence
accattagtagtggtggtacttatatctactatccagacagtgtgaagggg

SEQ ID NO: 127 - protein, 17 aa, Artificial Sequence
  Mouse C2 heavy chain variable complementarity determining regions 2 (CDR2) sequence
TISSGGTYIYYPDSVKG

SEQ ID NO: 128 - DNA, 96 bp, Artificial Sequence
  Mouse C2 heavy chain variable framework region 3 (FWR3) sequence
cgattcaccatctccagagacaatgccaagaacaccctgtacctgcaaatgagcagtctgaggtctgaggacacggccatgtattactgtgcaaga

SEQ ID NO: 129 - protein, 32 aa, Artificial Sequence
  Mouse C2 heavy chain variable framework region 3 (FWR3) sequence
RFTISRDNAKNTLYLQMSSLRSEDTAMYYCAR

SEQ ID NO: 130 - DNA, 36 bp, Artificial Sequence
  Mouse C2 heavy chain variable complementarity determining regions 3 (CDR3) sequence
cttgggggggataattactacgaatacttcgatgtc

SEQ ID NO: 131 - protein, 12 aa, Artificial Sequence
  Mouse C2 heavy chain variable complementarity determining regions 3 (CDR3) sequence
LGGDNYYEYFDV

SEQ ID NO: 132-143 - skipped (12 entries)

SEQ ID NO: 144 - DNA, 363 bp, Artificial Sequence
  Humanized derived from IGHV3-21*04 - Humanized C2 heavy chain variable region sequence
gaggtgcagctggtggagtctgggggaggcctggtcaagcctggggggtccctgagactctcctgtgcagcctctggattcaccttcagtggctatgccatgagctgggtccgccaggctccagggaaggggctggagtgggtctcaaccattagtagtggcggaacctacatatactaccccgactcagtgaagggccgattcaccatctccagagacaacgccaagaactcactgtatctgcaaatgaacagcctgagagccgaggacacggccgtgtattactgtgcgagacttgggggggataattactacgaatacttcgatgtctggggcaaagggaccacggtcaccgtctcctcc

SEQ ID NO: 145 - protein, 121 aa, Artificial Sequence
  Humanized C2 heavy chain variable region sequence
EVQLVESGGGLVKPGGSLRLSCAASGFTFSGYAMSWVRQAPGKGLEWVSTISSGGTYIYYPDSVKGRFTISRDNAKNSLYLQMNSLRAEDTAVYYCARLGGDNYYEYFDVWGKGTTVTVSS

SEQ ID NO: 146 - DNA, 90 bp, Artificial Sequence; identical to SEQ ID NO: 40
  Humanized C2 heavy chain variable framework region 1 (FWR1) sequence

SEQ ID NO: 147 - protein, 30 aa, Artificial Sequence; identical to SEQ ID NO: 41
  Humanized C2 heavy chain variable framework region 1 (FWR1) sequence

SEQ ID NO: 148 - DNA, 15 bp, Artificial Sequence
  Humanized C2 heavy chain variable complementarity determining regions 1 (CDR1) sequence
ggctatgccatgagc

SEQ ID NO: 149 - protein, 5 aa, Artificial Sequence
  Humanized C2 heavy chain variable complementarity determining regions 1 (CDR1) sequence
GYAMS

SEQ ID NO: 150 - DNA, 43 bp, Artificial Sequence
  Humanized C2 heavy chain variable framework region 2 (FWR2) sequence
tgggtccgccaggctccagggaaggggctggagtgggtctcaa

SEQ ID NO: 151 - protein, 14 aa, Artificial Sequence
  Humanized C2 heavy chain variable framework region 2 (FWR2) sequence
WVRQAPGKGLEWVS

SEQ ID NO: 152 - DNA, 51 bp, Artificial Sequence
  Humanized C2 heavy chain variable complementarity determining regions 2 (CDR2) sequence
accattagtagtggcggaacctacatatactaccccgactcagtgaagggc

SEQ ID NO: 153 - protein, 17 aa, Artificial Sequence
  Humanized C2 heavy chain variable complementarity determining regions 2 (CDR2) sequence
TISSGGTYIYYPDSVKG

SEQ ID NO: 154 - DNA, 96 bp, Artificial Sequence
  Humanized C2 heavy chain variable framework region 3 (FWR3) sequence
cgattcaccatctccagagacaacgccaagaactcactgtatctgcaaatgaacagcctgagagccgaggacacggccgtgtattactgtgcgaga

SEQ ID NO: 155 - protein, 32 aa, Artificial Sequence
  Humanized C2 heavy chain variable framework region 3 (FWR3) sequence
RFTISRDNAKNSLYLQMNSLRAEDTAVYYCAR

SEQ ID NO: 156 - DNA, 36 bp, Artificial Sequence; identical to SEQ ID NO: 130
  Humanized C2 heavy chain variable complementarity determining regions 3 (CDR3) sequence

SEQ ID NO: 157 - protein, 12 aa, Artificial Sequence
  Humanized C2 heavy chain variable complementarity determining regions 3 (CDR3) sequence
LGGDNYYEYFDV

SEQ ID NO: 158 - protein, 451 aa, Artificial Sequence
  Humanized C2 IgG1 heavy chain sequence
EVQLVESGGGLVKPGGSLRLSCAASGFTFSGYAMSWVRQAPGKGLEWVSTISSGGTYIYYPDSVKGRFTISRDNAKNSLYLQMNSLRAEDTAVYYCARLGGDNYYEYFDVWGKGTTVTVSSASTKGPSVFPLAPSSKSTSGGTAALGCLVKDYFPEPVTVSWNSGALTSGVHTFPAVLQSSGLYSLSSVVTVPSSSLGTQTYICNVNHKPSNTKVDKKVEPKSCDKTHTCPPCPAPELLGGPSVFLFPPKPKDTLMISRTPEVTCVVVDVSHEDPEVKFNWYVDGVEVHNAKTKPREEQYNSTYRVVSVLTVLHQDWLNGKEYKCKVSNKALPAPIEKTISKAKGQPREPQVYTLPPSREEMTKNQVSLTCLVKGFYPSDIAVEWESNGQPENNYKTTPPVLDSDGSFFLYSKLTVDKSRWQQGNVFSCSVMHEALHNHYTQKSLSLSPGK

SEQ ID NO: 159-162 - skipped (4 entries)

SEQ ID NO: 163 - DNA, 1347 bp, Artificial Sequence
  Humanized C2 IgG2 heavy chain sequence
gaggtgcagctggtggagtctgggggaggcctggtcaagcctggggggtccctgagactctcctgtgcagcctctggattcaccttcagtggctatgccatgagctgggtccgccaggctccagggaaggggctggagtgggtctcaaccattagtagtggcggaacctacatatactaccccgactcagtgaagggccgattcaccatctccagagacaacgccaagaactcactgtatctgcaaatgaacagcctgagagccgaggacacggccgtgtattactgtgcgagacttgggggggataattactacgaatacttcgatgtctggggcaaagggaccacggtcaccgtctcctccgcctccaccaagggcccatcggtcttccccctggcgccctgctccaggagcacctccgagagcacagccgccctgggctgcctggtcaaggactacttccccgaaccggtgacggtgtcgtggaactcaggcgctctgaccagcggcgtgcacaccttcccagctgtcctacagtcctcaggactctactccctcagcagcgtggtgaccgtgccctccagcaacttcggcacccagacctacacctgcaacgtagatcacaagcccagcaacaccaaggtggacaagacagttgagcgcaaatgttgtgtcgagtgcccaccgtgcccagcaccacctgtggcaggaccgtcagtcttcctcttccccccaaaacccaaggacaccctcatgatctcccggacccctgaggtcacgtgcgtggtggtggacgtgagccacgaagaccccgaggtccagttcaactggtacgtggacggcgtggaggtgcataatgccaagacaaagccacgggaggagcagttcaacagcacgttccgtgtggtcagcgtcctcaccgttgtgcaccaggactggctgaacggcaaggagtacaagtgcaaggtctccaacaaaggcctcccagcccccatcgagaaaaccatctccaaaaccaaagggcagccccgagaaccacaggtgtacaccctgcccccatcccgggaggagatgaccaagaaccaggtcagcctgacctgcctggtcaaaggcttctaccccagcgacatcgccgtggagtgggagagcaatgggcagccggagaacaactacaagaccacacctcccatgctggactccgacggctccttcttcctctacagcaagctcaccgtggacaagagcaggtggcagcaggggaacgtcttctcatgctccgtgatgcatgaggctctgcacaaccactacacgcagaagagcctctccctgtctccgggtaaatagtaa

SEQ ID NO: 164 - protein, 447 aa, Artificial Sequence
  Humanized C2 IgG2 heavy chain sequence
EVQLVESGGGLVKPGGSLRLSCAASGFTFSGYAMSWVRQAPGKGLEWVSTISSGGTYIYYPDSVKGRFTISRDNAKNSLYLQMNSLRAEDTAVYYCARLGGDNYYEYFDVWGKGTTVTVSSASTKGPSVFPLAPCSRSTSESTAALGCLVKDYFPEPVTVSWNSGALTSGVHTFPAVLQSSGLYSLSSVVTVPSSNFGTQTYTCNVDHKPSNTKVDKTVERKCCVECPPCPAPPVAGPSVFLFPPKPKDTLMISRTPEVTCVVVDVSHEDPEVQFNWYVDGVEVHNAKTKPREEQFNSTFRVVSVLTVVHQDWLNGKEYKCKVSNKGLPAPIEKTISKTKGQPREPQVYTLPPSREEMTKNQVSLTCLVKGFYPSDIAVEWESNGQPENNYKTTPPMLDSDGSFFLYSKLTVDKSRWQQGNVFSCSVMHEALHNHYTQKSLSLSPGK

SEQ ID NO: 165-167 - skipped (3 entries)

SEQ ID NO: 168 - DNA, 360 bp, Artificial Sequence
  Mouse C2 light chain variable region sequence
gacattgtgatcacacagtctacagcttccttaggtgtatctctggggcagagggccaccatctcatgcagggccagcaaaagtgtcagtacatctggctatagttatatgcactggtaccaacagagaccaggacagccacccaaactcctcatctatcttgcatccaacctagaatctggggtccctgccaggttcagtggcagtgggtctgggacagacttcaccctcaacatccatcctgtggaggaggaggatgctgcaacctattactgtcagcacagtagggagcttccgttcacgttcggaggggggaccaagctggagataaaacgggctgatgctgcaccaactgtatcc

SEQ ID NO: 169 - protein, 120 aa, Artificial Sequence
  Mouse C2 light chain variable region sequence
DIVITQSTASLGVSLGQRATISCRASKSVSTSGYSYMHWYQQRPGQPPKLLIYLASNLESGVPARFSGSGSGTDFTLNIHPVEEEDAATYYCQHSRELPFTFGGGTKLEIKRADAAPTVS

SEQ ID NO: 170 - DNA, 69 bp, Artificial Sequence
  Mouse C2 light chain variable framework region 1 (FWR1) sequence
gacattgtgatcacacagtctacagcttccttaggtgtatctctggggcagagggccaccatctcatgc

SEQ ID NO: 171 - protein, 23 aa, Artificial Sequence
  Mouse C2 light chain variable framework region 1 (FWR1) sequence
DIVITQSTASLGVSLGQRATISC

SEQ ID NO: 172 - DNA, 45 bp, Artificial Sequence
  Mouse C2 light chain variable complementarity determining regions 1 (CDR1) sequence
agggccagcaaaagtgtcagtacatctggctatagttatatgcac

SEQ ID NO: 173 - protein, 15 aa, Artificial Sequence
  Mouse C2 light chain variable complementarity determining regions 1 (CDR1) sequence
RASKSVSTSGYSYMH

SEQ ID NO: 174 - DNA, 45 bp, Artificial Sequence
  Mouse C2 light chain variable framework region 2 (FWR2) sequence
tggtaccaacagagaccaggacagccacccaaactcctcatctat

SEQ ID NO: 175 - protein, 15 aa, Artificial Sequence
  Mouse C2 light chain variable framework region 2 (FWR2) sequence
WYQQRPGQPPKLLIY

SEQ ID NO: 176 - DNA, 20 bp, Artificial Sequence
  Mouse C2 light chain variable complementarity determining regions 2 (CDR2) sequence
cttgcatccaacctagaatc

SEQ ID NO: 177 - protein, 7 aa, Artificial Sequence
  Mouse C2 light chain variable complementarity determining regions 2 (CDR2) sequence
LASNLES

SEQ ID NO: 178 - DNA, 97 bp, Artificial Sequence
  Mouse C2 light chain variable framework region 3 (FWR3) sequence
tggggtccctgccaggttcagtggcagtgggtctgggacagacttcaccctcaacatccatcctgtggaggaggaggatgctgcaacctattactgt

SEQ ID NO: 179 - protein, 32 aa, Artificial Sequence
  Mouse C2 light chain variable framework region 3 (FWR3) sequence
GVPARFSGSGSGTDFTLNIHPVEEEDAATYYC

SEQ ID NO: 180 - DNA, 27 bp, Artificial Sequence
  Mouse C2 light chain variable complementarity determining regions 3 (CDR3) sequence
cagcacagtagggagcttccgttcacg

SEQ ID NO: 181 - protein, 9 aa, Artificial Sequence
  Mouse C2 light chain variable complementarity determining regions 3 (CDR3) sequence
QHSRELPFT

SEQ ID NO: 182-193 - skipped (12 entries)

SEQ ID NO: 194 - DNA, 339 bp, Artificial Sequence
  Humanized derived from IGKV73*01 - Humanized C2 light chain variable region sequence
gacattgtgctgacccagtctccagcctccttggccgtgtctccaggacagagggccaccatcacctgcagagccagtaagagtgtcagtaccagcggatactcctacatgcactggtatcagcagaaaccaggacaacctcctaaactcctgatttacctggcatccaatctggagagcggggtcccagccaggttcagcggcagtgggtctgggaccgatttcaccctcacaattaatcctgtggaagctaatgatactgcaaattattactgtcagcacagtagggagctgcctttcacattcggcggagggaccaaggtggagatcaaacgaact

SEQ ID NO: 195 - protein, 113 aa, Artificial Sequence
  Humanized derived from IGKV73*01 - Humanized C2 light chain variable region sequence
DIVLTQSPASLAVSPGQRATITCRASKSVSTSGYSYMHWYQQKPGQPPKLLIYLASNLESGVPARFSGSGSGTDFTLTINPVEANDTANYYCQHSRELPFTFGGGTKVEIKRT

SEQ ID NO: 196 - DNA, 69 bp, Artificial Sequence
  Humanized C2 light chain variable framework region 1 (FWR1) acid sequence
gacattgtgctgacccagtctccagcctccttggccgtgtctccaggacagagggccaccatcacctgc

SEQ ID NO: 197 - protein, 23 aa, Artificial Sequence
  Humanized C2 light chain variable framework region 1 (FWR1) acid sequence
DIVLTQSPASLAVSPGQRATITC

SEQ ID NO: 198 - DNA, 45 bp, Artificial Sequence
  Humanized C2 light chain variable complementarity determining regions 1 (CDR1) sequence
agagccagtaagagtgtcagtaccagcggatactcctacatgcac

SEQ ID NO: 199 - protein, 15 aa, Artificial Sequence
  Humanized C2 light chain variable complementarity determining regions 1 (CDR1) sequence
RASKSVSTSGYSYMH

SEQ ID NO: 200 - DNA, 45 bp, Artificial Sequence
  Humanized C2 heavy light variable framework region 2 (FWR2) acid sequence
tggtatcagcagaaaccaggacaacctcctaaactcctgatttac

SEQ ID NO: 201 - protein, 15 aa, Artificial Sequence
  Humanized C2 heavy light variable framework region 2 (FWR2) acid sequence
WYQQKPGQPPKLLIY

SEQ ID NO: 202 - DNA, 21 bp, Artificial Sequence
  Humanized C2 light chain variable complementarity determining regions 2 (CDR2) sequence
ctggcatccaatctggagagc

SEQ ID NO: 203 - protein, 7 aa, Artificial Sequence
  Humanized C2 light chain variable complementarity determining regions 2 (CDR2) sequence
LASNLES

SEQ ID NO: 204 - DNA, 96 bp, Artificial Sequence
  Humanized C2 light chain variable framework region 3 (FWR3) acid sequence
ggggtcccagccaggttcagcggcagtgggtctgggaccgatttcaccctcacaattaatcctgtggaagctaatgatactgcaaattattactgt

SEQ ID NO: 205 - protein, 32 aa, Artificial Sequence
  Humanized C2 light chain variable framework region 3 (FWR3) acid sequence
GVPARFSGSGSGTDFTLTINPVEANDTANYYC

SEQ ID NO: 206 - DNA, 27 bp, Artificial Sequence
  Humanized C2 light chain variable complementarity determining regions 3 (CDR3) sequence
cagcacagtagggagctgcctttcaca

SEQ ID NO: 207 - protein, 9 aa, Artificial Sequence
  Humanized C2 light chain variable complementarity determining regions 3 (CDR3) sequence
QHSRELPFT

SEQ ID NO: 208 - DNA, 27 bp, Artificial Sequence
  Humanized C2 light chain variable complementarity determining regions 3 (CDR3) sequence
ctgcagagtaagaattttcctcccaca

SEQ ID NO: 209 - protein, 9 aa, Artificial Sequence
  Humanized C2 light chain variable complementarity determining regions 3 (CDR3) sequence
LQSKNFPPT

SEQ ID NO: 210-221 - skipped (12 entries)

SEQ ID NO: 222 - DNA, 63 bp, Artificial Sequence
  Murine Ig kappa chain leader sequence
atggagacagacacactcctgctatgggtactgctgctctgggttccaggttccactggtgac

SEQ ID NO: 223 - protein, 21 aa, Artificial Sequence
  Murine Ig kappa chain leader sequence
METDTLLLWVLLLWVPGSTGD

SEQ ID NO: 224 - DNA, 60 bp, Artificial Sequence
  Interleukin2 (IL2) leader sequence
atgtacaggatgcaactcctgtcttgcattgcactaagtcttgcacttgtcacaaacagt

SEQ ID NO: 225 - protein, 20 aa, Artificial Sequence
  Interleukin2 (IL2) leader sequence
MYRMQLLSCIALSLALVTNS

SEQ ID NO: 226 - DNA, 48 bp, Artificial Sequence
  CD33 leader sequence
atgcctcttctgcttctgcttcctctgctttgggctggagctcttgct

SEQ ID NO: 227 - protein, 16 aa, Artificial Sequence
  CD33 leader sequence
MPLLLLLPLLWAGALA

SEQ ID NO: 228 - DNA, 57 bp, Artificial Sequence
  IGHV321*03 leader sequence
atggaactggggctccgctgggttttccttgttgctattttagaaggtgtccagtgt

SEQ ID NO: 229 - protein, 19 aa, Artificial Sequence
  IGHV321*03 leader sequence
MELGLRWVFLVAILEGVQC

SEQ ID NO: 230 - DNA, 60 bp, Artificial Sequence
  IGHV311*02 leader sequence
atggaagccccagcgcagcttctcttcctcctgctactctggctcccagataccactgga

SEQ ID NO: 231 - protein, 20 aa, Artificial Sequence
  IGHV311*02 leader sequence
MEAPAQLLFLLLLWLPDTTG

SEQ ID NO: 232 - DNA, 729 bp, Artificial Sequence
  Humanized E6 single chain GS3
gaggtgcagctggtggagtctgggggaggcctggtcaagcctggggggtccctgagactctcctgtgcagcctctggattcaccttcagtaggtatggcatgagctgggtccgccaggctccagggaagaggctggagtgggtctcaaccattagtggcggaggcacctacatatactacccagactcagtgaagggccgattcaccatctccagagacaacgccaagaacaccctgtatctgcaaatgaacagcctgagagccgaggacacggctgtgtattactgtaccagagataactatggccgcaactatgattatggcatggattattggggccagggcaccctggtgaccgtgagcagcggcggtggcggatccggcggtggcggatccggcggtggcggatccgaaattgtgttgacacagtctccagccaccctgtctttgtctccaggggaaagagccaccctcacctgcagcgccaccagcagtgttagctacatccactggtaccaacagaggcctggccagagccccaggctcctcatctatagcacctccaacctggccagcggcatcccagccaggttcagtggcagtgggtctgggagcgactacactctcaccatcagcagcctagagcctgaagattttgcagtttattactgtcagcagcgtagcagctcccctttcacctttggcagcggcaccaaagtggaaattaaa

SEQ ID NO: 233 - protein, 243 aa, Artificial Sequence
  Humanized E6 single chain GS3
EVQLVESGGGLVKPGGSLRLSCAASGFTFSRYGMSWVRQAPGKRLEWVSTISGGGTYIYYPDSVKGRFTISRDNAKNTLYLQMNSLRAEDTAVYYCTRDNYGRNYDYGMDYWGQGTLVTVSSGGGGSGGGGSGGGGSEIVLTQSPATLSLSPGERATLTCSATSSVSYIHWYQQRPGQSPRLLIYSTSNLASGIPARFSGSGSGSDYTLTISSLEPEDFAVYYCQQRSSSPFTFGSGTKVEIK

SEQ ID NO: 234 - DNA, 747 bp, Artificial Sequence
  Humanized E6 single chain IgG1noC
gaggtgcagctggtggagtctgggggaggcctggtcaagcctggggggtccctgagactctcctgtgcagcctctggattcaccttcagtaggtatggcatgagctgggtccgccaggctccagggaagaggctggagtgggtctcaaccattagtggcggaggcacctacatatactacccagactcagtgaagggccgattcaccatctccagagacaacgccaagaacaccctgtatctgcaaatgaacagcctgagagccgaggacacggctgtgtattactgtaccagagataactatggccgcaactatgattatggcatggattattggggccagggcaccctggtgaccgtgagcagcgataaaacccatactaaaccgccaaaaccggcgccggaactgctgggtggtcctggtaccggtgaaattgtgttgacacagtctccagccaccctgtctttgtctccaggggaaagagccaccctcacctgcagcgccaccagcagtgttagctacatccactggtaccaacagaggcctggccagagccccaggctcctcatctatagcacctccaacctggccagcggcatcccagccaggttcagtggcagtgggtctgggagcgactacactctcaccatcagcagcctagagcctgaagattttgcagtttattactgtcagcagcgtagcagctcccctttcacctttggcagcggcaccaaagtggaaattaaa

SEQ ID NO: 235 - protein, 249 aa, Artificial Sequence
  Humanized E6 single chain IgG1noC
EVQLVESGGGLVKPGGSLRLSCAASGFTFSRYGMSWVRQAPGKRLEWVSTISGGGTYIYYPDSVKGRFTISRDNAKNTLYLQMNSLRAEDTAVYYCTRDNYGRNYDYGMDYWGQGTLVTVSSDKTHTKPPKPAPELLGGPGTGEIVLTQSPATLSLSPGERATLTCSATSSVSYIHWYQQRPGQSPRLLIYSTSNLASGIPARFSGSGSGSDYTLTISSLEPEDFAVYYCQQRSSSPFTFGSGTKVEIK

SEQ ID NO: 236 - DNA, 813 bp, Artificial Sequence
  Humanized E6 single chain X4 (linker is IgG1 and IgG2 modified hinge region
gaggtgcagctggtggagtctgggggaggcctggtcaagcctggggggtccctgagactctcctgtgcagcctctggattcaccttcagtaggtatggcatgagctgggtccgccaggctccagggaagaggctggagtgggtctcaaccattagtggcggaggcacctacatatactacccagactcagtgaagggccgattcaccatctccagagacaacgccaagaacaccctgtatctgcaaatgaacagcctgagagccgaggacacggctgtgtattactgtaccagagataactatggccgcaactatgattatggcatggattattggggccagggcaccctggtgaccgtgagcagcgataaaacccatactaaaccgccaaaaccggcgccggaactgctgggtggtcctggtaccggtactggtggtccgactattaaacctccgaaacctccgaaacctgctccgaacctgctgggtggtccggaaattgtgttgacacagtctccagccaccctgtctttgtctccaggggaaagagccaccctcacctgcagcgccaccagcagtgttagctacatccactggtaccaacagaggcctggccagagccccaggctcctcatctatagcacctccaacctggccagcggcatcccagccaggttcagtggcagtgggtctgggagcgactacactctcaccatcagcagcctagagcctgaagattttgcagtttattactgtcagcagcgtagcagctcccctttcacctttggcagcggcaccaaagtggaaattaaa

SEQ ID NO: 237 - protein, 271 aa, Artificial Sequence
  Humanized E6 single chain X4 (linker is IgG1 and IgG2 modified hinge region
EVQLVESGGGLVKPGGSLRLSCAASGFTFSRYGMSWVRQAPGKRLEWVSTISGGGTYIYYPDSVKGRFTISRDNAKNTLYLQMNSLRAEDTAVYYCTRDNYGRNYDYGMDYWGQGTLVTVSSDKTHTKPPKPAPELLGGPGTGTGGPTIKPPKPPKPAPNLLGGPEIVLTQSPATLSLSPGERATLTCSATSSVSYIHWYQQRPGQSPRLLIYSTSNLASGIPARFSGSGSGSDYTLTISSLEPEDFAVYYCQQRSSSPFTFGSGTKVEIK

SEQ ID NO: 238 - DNA, 747 bp, Artificial Sequence
  Humanized C2 single chain GS3
gaggtgcagctggtggagtctgggggaggcctggtcaagcctggggggtccctgagactctcctgtgcagcctctggattcaccttcagtggctatgccatgagctgggtccgccaggctccagggaaggggctggagtgggtctcaaccattagtagtggcggaacctacatatactaccccgactcagtgaagggccgattcaccatctccagagacaacgccaagaactcactgtatctgcaaatgaacagcctgagagccgaggacacggccgtgtattactgtgcgagacttgggggggataattactacgaatacttcgatgtctggggcaaagggaccacggtcaccgtctcctccggcggtggcggatccggcggtggcggatccggcggtggcggatccgacattgtgctgacccagtctccagcctccttggccgtgtctccaggacagagggccaccatcacctgcagagccagtaagagtgtcagtaccagcggatactcctacatgcactggtatcagcagaaaccaggacaacctcctaaactcctgatttacctggcatccaatctggagagcggggtcccagccaggttcagcggcagtgggtctgggaccgatttcaccctcacaattaatcctgtggaagctaatgatactgcaaattattactgtcagcacagtagggagctgcctttcacattcggcggagggaccaaggtggagatcaaacgaact

SEQ ID NO: 239 - protein, 249 aa, Artificial Sequence
  Humanized C2 single chain GS3
EVQLVESGGGLVKPGGSLRLSCAASGFTFSGYAMSWVRQAPGKGLEWVSTISSGGTYIYYPDSVKGRFTISRDNAKNSLYLQMNSLRAEDTAVYYCARLGGDNYYEYFDVWGKGTTVTVSSGGGGSGGGGSGGGGSDIVLTQSPASLAVSPGQRATITCRASKSVSTSGYSYMHWYQQKPGQPPKLLIYLASNLESGVPARFSGSGSGTDFTLTINPVEANDTANYYCQHSRELPFTFGGGTKVEIKRT

SEQ ID NO: 240-241 - skipped (2 entries)

SEQ ID NO: 242 - DNA, 831 bp, Artificial Sequence
  Humanized C2 single chain X4 (linker is IgG1 and IgG2 modified hinge region
gaggtgcagctggtggagtctgggggaggcctggtcaagcctggggggtccctgagactctcctgtgcagcctctggattcaccttcagtggctatgccatgagctgggtccgccaggctccagggaaggggctggagtgggtctcaaccattagtagtggcggaacctacatatactaccccgactcagtgaagggccgattcaccatctccagagacaacgccaagaactcactgtatctgcaaatgaacagcctgagagccgaggacacggccgtgtattactgtgcgagacttgggggggataattactacgaatacttcgatgtctggggcaaagggaccacggtcaccgtctcctccgataaaacccatactaaaccgccaaaaccggcgccggaactgctgggtggtcctggtaccggtactggtggtccgactattaaacctccgaaacctccgaaacctgctccgaacctgctgggtggtccggacattgtgctgacccagtctccagcctccttggccgtgtctccaggacagagggccaccatcacctgcagagccagtaagagtgtcagtaccagcggatactcctacatgcactggtatcagcagaaaccaggacaacctcctaaactcctgatttacctggcatccaatctggagagcggggtcccagccaggttcagcggcagtgggtctgggaccgatttcaccctcacaattaatcctgtggaagctaatgatactgcaaattattactgtcagcacagtagggagctgcctttcacattcggcggagggaccaaggtggagatcaaacgaact

SEQ ID NO: 243 - protein, 277 aa, Artificial Sequence
  Humanized C2 single chain X4 (linker is IgG1 and IgG2 modified hinge region
EVQLVESGGGLVKPGGSLRLSCAASGFTFSGYAMSWVRQAPGKGLEWVSTISSGGTYIYYPDSVKGRFTISRDNAKNSLYLQMNSLRAEDTAVYYCARLGGDNYYEYFDVWGKGTTVTVSSDKTHTKPPKPAPELLGGPGTGTGGPTIKPPKPPKPAPNLLGGPDIVLTQSPASLAVSPGQRATITCRASKSVSTSGYSYMHWYQQKPGQPPKLLIYLASNLESGVPARFSGSGSGTDFTLTINPVEANDTANYYCQHSRELPFTFGGGTKVEIKRT

SEQ ID NO: 244 - DNA, 744 bp, Artificial Sequence
  Humanized C3 single chain GS3
caggttcagctggtgcagtctggagctgaggtgaagaagcctggggcctcagtgaaggtctcctgcaaggcttctggttacacctttaccgactacgccatgaactgggtgcgacaggcccctggacaagggcttgagtggatgggagtgatcagcaccttcagcggtaacacaaacttcaaccagaagttcaagggcagagtcaccatgaccacagacacatccacgagcacagcctacatggagctgaggagcctgagatctgacgacacggccgtgtattactgtgcgagaagcgactactacggcccatacttcgactactggggccagggcaccaccctgaccgtgtccagcggcggtggcggatccggcggtggcggatccggcggtggcggatccgatattgtgatgacccagactccactctctctgtccgtcacccctggacagccggcctccatctcctgcaggtctagtcagaccattgtccatagtaatggaaacacctatttggagtggtacctgcagaagccaggccagtctccacagctcctgatctataaggtttccaaccggttctctggagtgccagataggttcagtggcagcgggtcagggacagatttcacactgaaaatcagccgggtggaggctgaggatgttggggtttattactgcttccaaggtagccacgtgcctttcaccttcggcggagggaccaaggtggagatcaaacgaact

SEQ ID NO: 245 - protein, 248 aa, Artificial Sequence
  Humanized C3 single chain GS3
QVQLVQSGAEVKKPGASVKVSCKASGYTFTDYAMNWVRQAPGQGLEWMGVISTFSGNTNFNQKFKGRVTMTTDTSTSTAYMELRSLRSDDTAVYYCARSDYYGPYFDYWGQGTTLTVSSGGGGSGGGGSGGGGSDIVMTQTPLSLSVTPGQPASISCRSSQTIVHSNGNTYLEWYLQKPGQSPQLLIYKVSNRFSGVPDRFSGSGSGTDFTLKISRVEAEDVGVYYCFQGSHVPFTFGGGTKVEIKRT

SEQ ID NO: 246-247 - skipped (2 entries)

SEQ ID NO: 248 - DNA, 828 bp, Artificial Sequence
  Humanized C3 single chain X4 (linker is IgG1 and IgG2 modified hinge region
caggttcagctggtgcagtctggagctgaggtgaagaagcctggggcctcagtgaaggtctcctgcaaggcttctggttacacctttaccgactacgccatgaactgggtgcgacaggcccctggacaagggcttgagtggatgggagtgatcagcaccttcagcggtaacacaaacttcaaccagaagttcaagggcagagtcaccatgaccacagacacatccacgagcacagcctacatggagctgaggagcctgagatctgacgacacggccgtgtattactgtgcgagaagcgactactacggcccatacttcgactactggggccagggcaccaccctgaccgtgtccagcgataaaacccatactaaaccgccaaaaccggcgccggaactgctgggtggtcctggtaccggtactggtggtccgactattaaacctccgaaacctccgaaacctgctccgaacctgctgggtggtccggatattgtgatgacccagactccactctctctgtccgtcacccctggacagccggcctccatctcctgcaggtctagtcagaccattgtccatagtaatggaaacacctatttggagtggtacctgcagaagccaggccagtctccacagctcctgatctataaggtttccaaccggttctctggagtgccagataggttcagtggcagcgggtcagggacagatttcacactgaaaatcagccgggtggaggctgaggatgttggggtttattactgcttccaaggtagccacgtgcctttcaccttcggcggagggaccaaggtggagatcaaacgaact

SEQ ID NO: 249 - protein, 276 aa, Artificial Sequence
  Humanized C3 single chain X4 (linker is IgG1 and IgG2 modified hinge region
QVQLVQSGAEVKKPGASVKVSCKASGYTFTDYAMNWVRQAPGQGLEWMGVISTFSGNTNFNQKFKGRVTMTTDTSTSTAYMELRSLRSDDTAVYYCARSDYYGPYFDYWGQGTTLTVSSDKTHTKPPKPAPELLGGPGTGTGGPTIKPPKPPKPAPNLLGGPDIVMTQTPLSLSVTPGQPASISCRSSQTIVHSNGNTYLEWYLQKPGQSPQLLIYKVSNRFSGVPDRFSGSGSGTDFTLKISRVEAEDVGVYYCFQGSHVPFTFGGGTKVEIKRT

SEQ ID NO: 250 - DNA, 741 bp, Artificial Sequence
  Humanized C8 single chain GS3 (linker is [Gly4Ser1]3
gaggtgcagctggtggagtctgggggaggcctggtcaagcctggggggtccctgagactctcctgtgcagcctctggattcaccttcagtggctatgccatgagctgggtccgccaggctccagggaaggggctggagtgggtctcaaccattagtagtggcggaacctacatatactaccctgactcagtgaagggccgattcaccatctccagagacaacgccaagaactcactgtatctgcaaatgaacagcctgagagccgaggacacggccgtgtattactgtgcgagactgggcggcgataactattatgaatattggggcaaagggaccacggtcaccgtctcctccggcggtggcggatccggcggtggcggatccggcggtggcggatccgacatcgtgatgacccagtctccagactccctggctgtgtctctgggcgagagggccaccatcaactgcagggccagcaagagtgttagcaccagcggctacagctacatgcactggtaccagcagaaaccaggacagcctcctaagctgctcatttacctggtgtctaacctggaatccggggtccctgaccgattcagtggcagcgggtctgggacagatttcactctcaccatcagcagcctgcaggctgaagatgtggcagtttattactgtcaacacattcgggaactgaccaggagtgaattcggcggagggaccaaggtggagatcaaacgaact

SEQ ID NO: 251 - protein, 247 aa, Artificial Sequence
  Humanized C8 single chain GS3 (linker is [Gly4Ser1]3
EVQLVESGGGLVKPGGSLRLSCAASGFTFSGYAMSWVRQAPGKGLEWVSTISSGGTYIYYPDSVKGRFTISRDNAKNSLYLQMNSLRAEDTAVYYCARLGGDNYYEYWGKGTTVTVSSGGGGSGGGGSGGGGSDIVMTQSPDSLAVSLGERATINCRASKSVSTSGYSYMHWYQQKPGQPPKLLIYLVSNLESGVPDRFSGSGSGTDFTLTISSLQAEDVAVYYCQHIRELTRSEFGGGTKVEIKRT

SEQ ID NO: 252-255 - skipped (4 entries)

SEQ ID NO: 256 - DNA, 1509 bp, Artificial Sequence
  pSECTag2 E6 scFVFC
atggagacagacacactcctgctatgggtactgctgctctgggttccaggttccactggtgacgcggcccagccggccgaggtgcagctggtggagtctgggggaggcctggtcaagcctggggggtccctgagactctcctgtgcagcctctggattcaccttcagtaggtatggcatgagctgggtccgccaggctccagggaagaggctggagtgggtctcaaccattagtggcggaggcacctacatatactacccagactcagtgaagggccgattcaccatctccagagacaacgccaagaacaccctgtatctgcaaatgaacagcctgagagccgaggacacggctgtgtattactgtaccagagataactatggccgcaactatgattatggcatggattattggggccagggcaccctggtgaccgtgagcagcggcggtggcggatccggcggtggcggatccggcggtggcggatccgaaattgtgttgacacagtctccagccaccctgtctttgtctccaggggaaagagccaccctcacctgcagcgccaccagcagtgttagctacatccactggtaccaacagaggcctggccagagccccaggctcctcatctatagcacctccaacctggccagcggcatcccagccaggttcagtggcagtgggtctgggagcgactacactctcaccatcagcagcctagagcctgaagattttgcagtttattactgtcagcagcgtagcagctcccctttcacctttggcagcggcaccaaagtggaaattaaagagcccaaatcttgtgacaaaactcacacatgcccaccgtgcccagcacctgaactcctggggggaccgtcagtcttcctcttccccccaaaacccaaggacaccctcatgatctcccggacccctgaggtcacatgcgtggtggtggacgtgagccacgaagaccctgaggtcaagttcaactggtacgtggacggcgtggaggtgcataatgccaagacaaagccgcgggaggagcagtacaacagcacgtaccgtgtggtcagcgtcctcaccgtcctgcaccaggactggctgaatggcaaggagtacaagtgcaaggtctccaacaaagccctcccagcccccatcgagaaaaccatctccaaagccaaagggcagccccgagaaccacaggtgtacaccctgcccccatcccgggaggagatgaccaagaaccaggtcagcctgacctgcctggtcaaaggcttctatcccagcgacatcgccgtggagtgggagagcaatgggcagccggagaacaactacaagaccacgcctcccgtgctggactccgacggctccttcttcctctacagcaagctcaccgtggacaagagcaggtggcagcaggggaacgtcttctcatgctccgtgatgcatgaggctctgcacaaccactacacgcagaagagcctctccctgtctccgggtaaatgataa

SEQ ID NO: 257 - protein, 501 aa, Artificial Sequence
  pSECTag2 E6 scFVFC
METDTLLLWVLLLWVPGSTGDAAQPAEVQLVESGGGLVKPGGSLRLSCAASGFTFSRYGMSWVRQAPGKRLEWVSTISGGGTYIYYPDSVKGRFTISRDNAKNTLYLQMNSLRAEDTAVYYCTRDNYGRNYDYGMDYWGQGTLVTVSSGGGGSGGGGSGGGGSEIVLTQSPATLSLSPGERATLTCSATSSVSYIHWYQQRPGQSPRLLIYSTSNLASGIPARFSGSGSGSDYTLTISSLEPEDFAVYYCQQRSSSPFTFGSGTKVEIKEPKSCDKTHTCPPCPAPELLGGPSVFLFPPKPKDTLMISRTPEVTCVVVDVSHEDPEVKFNWYVDGVEVHNAKTKPREEQYNSTYRVVSVLTVLHQDWLNGKEYKCKVSNKALPAPIEKTISKAKGQPREPQVYTLPPSREEMTKNQVSLTCLVKGFYPSDIAVEWESNGQPENNYKTTPPVLDSDGSFFLYSKLTVDKSRWQQGNVFSCSVMHEALHNHYTQKSLSLSPGK

SEQ ID NO: 258-271 - skipped (14 entries)

SEQ ID NO: 272 - DNA, 702 bp, Artificial Sequence
  Human IgG1 Fc sequence
gagcccaaatcttgtgacaaaactcacacatgcccaccgtgcccagcacctgaactcctggggggaccgtcagtcttcctcttccccccaaaacccaaggacaccctcatgatctcccggacccctgaggtcacatgcgtggtggtggacgtgagccacgaagaccctgaggtcaagttcaactggtacgtggacggcgtggaggtgcataatgccaagacaaagccgcgggaggagcagtacaacagcacgtaccgtgtggtcagcgtcctcaccgtcctgcaccaggactggctgaatggcaaggagtacaagtgcaaggtctccaacaaagccctcccagcccccatcgagaaaaccatctccaaagccaaagggcagccccgagaaccacaggtgtacaccctgcccccatcccgggaggagatgaccaagaaccaggtcagcctgacctgcctggtcaaaggcttctatcccagcgacatcgccgtggagtgggagagcaatgggcagccggagaacaactacaagaccacgcctcccgtgctggactccgacggctccttcttcctctacagcaagctcaccgtggacaagagcaggtggcagcaggggaacgtcttctcatgctccgtgatgcatgaggctctgcacaaccactacacgcagaagagcctctccctgtctccgggtaaatgataa

SEQ ID NO: 273 - protein, 232 aa, Artificial Sequence
  Human IgG1 Fc sequence
EPKSCDKTHTCPPCPAPELLGGPSVFLFPPKPKDTLMISRTPEVTCVVVDVSHEDPEVKFNWYVDGVEVHNAKTKPREEQYNSTYRVVSVLTVLHQDWLNGKEYKCKVSNKALPAPIEKTISKAKGQPREPQVYTLPPSREEMTKNQVSLTCLVKGFYPSDIAVEWESNGQPENNYKTTPPVLDSDGSFFLYSKLTVDKSRWQQGNVFSCSVMHEALHNHYTQKSLSLSPGK

SEQ ID NO: 274 - DNA, 666 bp, Artificial Sequence
  Human IgG1 CH2CH3 domain sequence
ccgtgcccagcacctgaactcctggggggaccgtcagtcttcctcttccccccaaaacccaaggacaccctcatgatctcccggacccctgaggtcacatgcgtggtggtggacgtgagccacgaagaccctgaggtcaagttcaactggtacgtggacggcgtggaggtgcataatgccaagacaaagccgcgggaggagcagtacaacagcacgtaccgtgtggtcagcgtcctcaccgtcctgcaccaggactggctgaatggcaaggagtacaagtgcaaggtctccaacaaagccctcccagcccccatcgagaaaaccatctccaaagccaaagggcagccccgagaaccacaggtgtacaccctgcccccatcccgggaggagatgaccaagaaccaggtcagcctgacctgcctggtcaaaggcttctatcccagcgacatcgccgtggagtgggagagcaatgggcagccggagaacaactacaagaccacgcctcccgtgctggactccgacggctccttcttcctctacagcaagctcaccgtggacaagagcaggtggcagcaggggaacgtcttctcatgctccgtgatgcatgaggctctgcacaaccactacacgcagaagagcctctccctgtctccgggtaaatgataa

SEQ ID NO: 275 - protein, 220 aa, Artificial Sequence
  Human IgG1 CH2CH3 domain sequence
PCPAPELLGGPSVFLFPPKPKDTLMISRTPEVTCVVVDVSHEDPEVKFNWYVDGVEVHNAKTKPREEQYNSTYRVVSVLTVLHQDWLNGKEYKCKVSNKALPAPIEKTISKAKGQPREPQVYTLPPSREEMTKNQVSLTCLVKGFYPSDIAVEWESNGQPENNYKTTPPVLDSDGSFFLYSKLTVDKSRWQQGNVFSCSVMHEALHNHYTQKSLSLSPGK

SEQ ID NO: 276 - DNA, 327 bp, Artificial Sequence
  Human IgG1 CH3 domain sequence
gggcagccccgagaaccacaggtgtacaccctgcccccatcccgggaggagatgaccaagaaccaggtcagcctgacctgcctggtcaaaggcttctatcccagcgacatcgccgtggagtgggagagcaatgggcagccggagaacaactacaagaccacgcctcccgtgctggactccgacggctccttcttcctctacagcaagctcaccgtggacaagagcaggtggcagcaggggaacgtcttctcatgctccgtgatgcatgaggctctgcacaaccactacacgcagaagagcctctccctgtctccgggtaaatgataa

SEQ ID NO: 277 - protein, 107 aa, Artificial Sequence
  Human IgG1 CH3 domain sequence
GQPREPQVYTLPPSREEMTKNQVSLTCLVKGFYPSDIAVEWESNGQPENNYKTTPPVLDSDGSFFLYSKLTVDKSRWQQGNVFSCSVMHEALHNHYTQKSLSLSPGK

SEQ ID NO: 278-296 - skipped (19 entries)

SEQ ID NO: 297 - DNA, 1464 bp, Artificial Sequence
  CART E6 CD8/CD8/CD28/CD3z sequence - NCD8lshuMNE6scFvCD8ecd fragment CD8 transmembrane CD28 CD3zetaC
atggccctgcccgtgaccgctttgctgctccccctggcgctgctgctgcacgccgccaggccagaggtccagctggttgagagtggcggtgggctggttaagcctggcggctccctgcggctgagctgcgccgcgagtggatttactttcagccgatatgggatgagttgggtgcggcaagctcccgggaagaggctggaatgggtctcaacaatctccggggggggcacttacatctattaccccgactcagtcaaggggagatttaccatttcacgagacaacgctaagaataccctgtatttgcagatgaattctctgagagcagaggacacagctgtttactattgtacccgcgacaactatggcaggaactacgactacggtatggactattggggacaagggacattggttacagtgagcagtggcggcgggggcagcggaggaggaggcagcggtggggggggcagcgagatagtgctcacgcagtcacccgcgactctcagtctctcacctggggaacgagctaccctgacgtgctctgctacctcctcagtgtcatatattcactggtatcagcaacggcccgggcagtcccctagattgctcatttatagtacctctaatctggcctcaggtatccctgcacgattttctggatctggttcaggttctgattacaccctcactatctctagcctggagcctgaagactttgccgtttattactgccagcagaggtctagctccccattcacctttgggagtgggaccaaggttgaaattaaaacgacaaccccggcccccagaccaccaacgccagcccccaccatcgccagccaacccctgtctctgagaccagaagcctgtaggcctgccgccggtggagctgtgcacacaagaggactggatttcgcctgtgatatctacatttgggccccgctcgcaggcacatgtggagtgctcctcctctccctggtgattaccctgtactgcagaagcaagcggtctcggctcctgcattctgattacatgaacatgaccccaagaagaccaggccccaccaggaaacattaccagccctacgctccgccacgcgacttcgctgcctaccggtcccgcgttaagttctcccgatcagccgacgcgcctgcttacaagcagggccagaaccaactgtacaacgagctgaatctcggtagacgggaagagtacgacgtgttggacaaacggagaggccgcgacccagaaatgggcggcaagcctcgcaggaaaaacccccaggagggactgtacaatgagttgcagaaagataagatggcagaagcttatagcgagatcggaatgaagggggaaaggagacgagggaaaggacacgacggcctttatcagggcctgtccacagcaacaaaagatacgtatgacgccctccatatgcaggcacttccaccacggtgataa

SEQ ID NO: 298 - protein, 486 aa, Artificial Sequence
  CART E6 CD8/CD8/CD28/CD3z sequence - NCD8lshuMNE6scFvCD8ecd fragment CD8 transmembrane CD28 CD3zetaC
MALPVTALLLPLALLLHAARPEVQLVESGGGLVKPGGSLRLSCAASGFTFSRYGMSWVRQAPGKRLEWVSTISGGGTYIYYPDSVKGRFTISRDNAKNTLYLQMNSLRAEDTAVYYCTRDNYGRNYDYGMDYWGQGTLVTVSSGGGGSGGGGSGGGGSEIVLTQSPATLSLSPGERATLTCSATSSVSYIHWYQQRPGQSPRLLIYSTSNLASGIPARFSGSGSGSDYTLTISSLEPEDFAVYYCQQRSSSPFTFGSGTKVEIKTTTPAPRPPTPAPTIASQPLSLRPEACRPAAGGAVHTRGLDFACDIYIWAPLAGTCGVLLLSLVITLYCRSKRSRLLHSDYMNMTPRRPGPTRKHYQPYAPPRDFAAYRSRVKFSRSADAPAYKQGQNQLYNELNLGRREEYDVLDKRRGRDPEMGGKPRRKNPQEGLYNELQKDKMAEAYSEIGMKGERRRGKGHDGLYQGLSTATKDTYDALHMQALPPR

SEQ ID NO: 299 - skipped

SEQ ID NO: 300 - DNA, 1467 bp, Artificial Sequence
  CART E6 CD8/CD8/41BB/CD3z sequence - NCD8lshuMNE6scFvCD8ecd fragment CD8 transmembrane 41BB CD3zetaC
atggccctgcccgtgaccgctttgctgctccccctggcgctgctgctgcacgccgccaggccagaggtccagctggttgagagtggcggtgggctggttaagcctggcggctccctgcggctgagctgcgccgcgagtggatttactttcagccgatatgggatgagttgggtgcggcaagctcccgggaagaggctggaatgggtctcaacaatctccggggggggcacttacatctattaccccgactcagtcaaggggagatttaccatttcacgagacaacgctaagaataccctgtatttgcagatgaattctctgagagcagaggacacagctgtttactattgtacccgcgacaactatggcaggaactacgactacggtatggactattggggacaagggacattggttacagtgagcagtggcggcgggggcagcggaggaggaggcagcggtggggggggcagcgagatagtgctcacgcagtcacccgcgactctcagtctctcacctggggaacgagctaccctgacgtgctctgctacctcctcagtgtcatatattcactggtatcagcaacggcccgggcagtcccctagattgctcatttatagtacctctaatctggcctcaggtatccctgcacgattttctggatctggttcaggttctgattacaccctcactatctctagcctggagcctgaagactttgccgtttattactgccagcagaggtctagctccccattcacctttgggagtgggaccaaggttgaaattaaaacgacaaccccggcccccagaccaccaacgccagcccccaccatcgccagccaacccctgtctctgagaccagaagcctgtaggcctgccgccggtggagctgtgcacacaagaggactggatttcgcctgtgatatctacatttgggccccgctcgcaggcacatgtggagtgctcctcctctccctggtgattaccctgtactgcaaaaggggccgcaaaaaactcctttacatttttaagcagccttttatgaggccagtacagacgactcaagaggaagacgggtgctcatgccgctttcctgaggaggaggaaggagggtgcgaactgcgcgttaagttctcccgatcagccgacgcgcctgcttacaagcagggccagaaccaactgtacaacgagctgaatctcggtagacgggaagagtacgacgtgttggacaaacggagaggccgcgacccagaaatgggcggcaagcctcgcaggaaaaacccccaggagggactgtacaatgagttgcagaaagataagatggcagaagcttatagcgagatcggaatgaagggggaaaggagacgagggaaaggacacgacggcctttatcagggcctgtccacagcaacaaaagatacgtatgacgccctccatatgcaggcacttccaccacggtgataa

SEQ ID NO: 301 - protein, 487 aa, Artificial Sequence
  CART E6 CD8/CD8/41BB/CD3z sequence - NCD8lshuMNE6scFvCD8ecd fragment CD8 transmembrane 41BB CD3zetaC
MALPVTALLLPLALLLHAARPEVQLVESGGGLVKPGGSLRLSCAASGFTFSRYGMSWVRQAPGKRLEWVSTISGGGTYIYYPDSVKGRFTISRDNAKNTLYLQMNSLRAEDTAVYYCTRDNYGRNYDYGMDYWGQGTLVTVSSGGGGSGGGGSGGGGSEIVLTQSPATLSLSPGERATLTCSATSSVSYIHWYQQRPGQSPRLLIYSTSNLASGIPARFSGSGSGSDYTLTISSLEPEDFAVYYCQQRSSSPFTFGSGTKVEIKTTTPAPRPPTPAPTIASQPLSLRPEACRPAAGGAVHTRGLDFACDIYIWAPLAGTCGVLLLSLVITLYCKRGRKKLLYIFKQPFMRPVQTTQEEDGCSCRFPEEEEGGCELRVKFSRSADAPAYKQGQNQLYNELNLGRREEYDVLDKRRGRDPEMGGKPRRKNPQEGLYNELQKDKMAEAYSEIGMKGERRRGKGHDGLYQGLSTATKDTYDALHMQALPPR

SEQ ID NO: 302 - skipped

SEQ ID NO: 303 - DNA, 1590 bp, Artificial Sequence
  CART E6 CD8/CD8/CD28/41BB/CD3z sequence - NCD8lshuMNE6scFvCD8ecd fragment CD8 transmembrane CD28 41BB CD3zetaC
atggccctgcccgtgaccgctttgctgctccccctggcgctgctgctgcacgccgccaggccagaggtccagctggttgagagtggcggtgggctggttaagcctggcggctccctgcggctgagctgcgccgcgagtggatttactttcagccgatatgggatgagttgggtgcggcaagctcccgggaagaggctggaatgggtctcaacaatctccggggggggcacttacatctattaccccgactcagtcaaggggagatttaccatttcacgagacaacgctaagaataccctgtatttgcagatgaattctctgagagcagaggacacagctgtttactattgtacccgcgacaactatggcaggaactacgactacggtatggactattggggacaagggacattggttacagtgagcagtggcggcgggggcagcggaggaggaggcagcggtggggggggcagcgagatagtgctcacgcagtcacccgcgactctcagtctctcacctggggaacgagctaccctgacgtgctctgctacctcctcagtgtcatatattcactggtatcagcaacggcccgggcagtcccctagattgctcatttatagtacctctaatctggcctcaggtatccctgcacgattttctggatctggttcaggttctgattacaccctcactatctctagcctggagcctgaagactttgccgtttattactgccagcagaggtctagctccccattcacctttgggagtgggaccaaggttgaaattaaaacgacaaccccggcccccagaccaccaacgccagcccccaccatcgccagccaacccctgtctctgagaccagaagcctgtaggcctgccgccggtggagctgtgcacacaagaggactggatttcgcctgtgatatctacatttgggccccgctcgcaggcacatgtggagtgctcctcctctccctggtgattaccctgtactgcagaagcaagcggtctcggctcctgcattctgattacatgaacatgaccccaagaagaccaggccccaccaggaaacattaccagccctacgctccgccacgcgacttcgctgcctaccggtccaaaaggggccgcaaaaaactcctttacatttttaagcagccttttatgaggccagtacagacgactcaagaggaagacgggtgctcatgccgctttcctgaggaggaggaaggagggtgcgaactgcgcgttaagttctcccgatcagccgacgcgcctgcttacaagcagggccagaaccaactgtacaacgagctgaatctcggtagacgggaagagtacgacgtgttggacaaacggagaggccgcgacccagaaatgggcggcaagcctcgcaggaaaaacccccaggagggactgtacaatgagttgcagaaagataagatggcagaagcttatagcgagatcggaatgaagggggaaaggagacgagggaaaggacacgacggcctttatcagggcctgtccacagcaacaaaagatacgtatgacgccctccatatgcaggcacttccaccacggtgataa

SEQ ID NO: 304 - protein, 528 aa, Artificial Sequence
  CART E6 CD8/CD8/CD28/41BB/CD3z sequence - NCD8lshuMNE6scFvCD8ecd fragment CD8 transmembrane CD28 41BB CD3zetaC
MALPVTALLLPLALLLHAARPEVQLVESGGGLVKPGGSLRLSCAASGFTFSRYGMSWVRQAPGKRLEWVSTISGGGTYIYYPDSVKGRFTISRDNAKNTLYLQMNSLRAEDTAVYYCTRDNYGRNYDYGMDYWGQGTLVTVSSGGGGSGGGGSGGGGSEIVLTQSPATLSLSPGERATLTCSATSSVSYIHWYQQRPGQSPRLLIYSTSNLASGIPARFSGSGSGSDYTLTISSLEPEDFAVYYCQQRSSSPFTFGSGTKVEIKTTTPAPRPPTPAPTIASQPLSLRPEACRPAAGGAVHTRGLDFACDIYIWAPLAGTCGVLLLSLVITLYCRSKRSRLLHSDYMNMTPRRPGPTRKHYQPYAPPRDFAAYRSKRGRKKLLYIFKQPFMRPVQTTQEEDGCSCRFPEEEEGGCELRVKFSRSADAPAYKQGQNQLYNELNLGRREEYDVLDKRRGRDPEMGGKPRRKNPQEGLYNELQKDKMAEAYSEIGMKGERRRGKGHDGLYQGLSTATKDTYDALHMQALPPR

SEQ ID NO: 305 - skipped

SEQ ID NO: 306 - DNA, 1608 bp, Artificial Sequence
  CART C2 CD8/CD8/CD28/41BB/CD3z sequence - NCD8lshuMNC2scFvCD8ecd fragment CD8 transmembrane CD28 41BB CD3zetaC
atggccttgccagtgacggccctgctgctgccattggctcttctgttgcacgctgccaggcctgaagtgcagctcgtagagagtggcgggggactggtgaagcccggtggaagcctcagactcagttgcgccgcctcaggtttcactttttcaggttacgccatgtcctgggtaagacaggcaccggggaaaggactcgagtgggtgtctactatcagctcaggaggcacttatatatattatcctgactctgtaaaaggccgatttacgatttctcgcgacaatgcaaagaactccctctacctccaaatgaacagtcttagggcagaagacactgctgtatactattgtgcacgcctcggcggcgacaactactacgagtactttgacgtgtgggggaaagggactaccgtgacagtttcaagcggaggaggtggctcaggtggaggcgggtcaggggggggaggaagtgatattgtgctcacacaatccccagcctccctggctgtgtctcccggccaacgcgctacaattacatgtcgggcctccaaaagcgtgagcaccagcggctacagctacatgcactggtatcaacagaaaccaggacaaccccccaaactgttgatttatctcgcttcaaacttggagtccggcgtgcctgcgcgcttttcagggagtgggagcggcacagattttacgctgactatcaaccccgtagaagcaaacgatacagcgaattattattgtcaacattcccgggaactcccctttacgttcggcgggggcacaaaggtcgaaattaagagaaccacgacaaccccggcccccagaccaccaacgccagcccccaccatcgccagccaacccctgtctctgagaccagaagcctgtaggcctgccgccggtggagctgtgcacacaagaggactggatttcgcctgtgatatctacatttgggccccgctcgcaggcacatgtggagtgctcctcctctccctggtgattaccctgtactgcagaagcaagcggtctcggctcctgcattctgattacatgaacatgaccccaagaagaccaggccccaccaggaaacattaccagccctacgctccgccacgcgacttcgctgcctaccggtccaaaaggggccgcaaaaaactcctttacatttttaagcagccttttatgaggccagtacagacgactcaagaggaagacgggtgctcatgccgctttcctgaggaggaggaaggagggtgcgaactgcgcgttaagttctcccgatcagccgacgcgcctgcttacaagcagggccagaaccaactgtacaacgagctgaatctcggtagacgggaagagtacgacgtgttggacaaacggagaggccgcgacccagaaatgggcggcaagcctcgcaggaaaaacccccaggagggactgtacaatgagttgcagaaagataagatggcagaagcttatagcgagatcggaatgaagggggaaaggagacgagggaaaggacacgacggcctttatcagggcctgtccacagcaacaaaagatacgtatgacgccctccatatgcaggcacttccaccacggtgataa

SEQ ID NO: 307 - protein, 513 aa, Artificial Sequence
  CART C2 CD8/CD8/CD28/41BB/CD3z sequence - NCD8lshuMNC2scFvCD8ecd fragment CD8 transmembrane CD28 41BB CD3zetaC
EVQLVESGGGLVKPGGSLRLSCAASGFTFSGYAMSWVRQAPGKGLEWVSTISSGGTYIYYPDSVKGRFTISRDNAKNSLYLQMNSLRAEDTAVYYCARLGGDNYYEYFDVWGKGTTVTVSSGGGGSGGGGSGGGGSDIVLTQSPASLAVSPGQRATITCRASKSVSTSGYSYMHWYQQKPGQPPKLLIYLASNLESGVPARFSGSGSGTDFTLTINPVEANDTANYYCQHSRELPFTFGGGTKVEIKRTTTTPAPRPPTPAPTIASQPLSLRPEACRPAAGGAVHTRGLDFACDIYIWAPLAGTCGVLLLSLVITLYCRSKRSRLLHSDYMNMTPRRPGPTRKHYQPYAPPRDFAAYRSKRGRKKLLYIFKQPFMRPVQTTQEEDGCSCRFPEEEEGGCELRVKFSRSADAPAYKQGQNQLYNELNLGRREEYDVLDKRRGRDPEMGGKPRRKNPQEGLYNELQKDKMAEAYSEIGMKGERRRGKGHDGLYQGLSTATKDTYDALHMQALPPR

SEQ ID NO: 308-340 - skipped (33 entries)

SEQ ID NO: 341 - DNA, 729 bp, Artificial Sequence
  Humanized E6 scFV sequence in CAR
gaggtccagctggttgagagtggcggtgggctggttaagcctggcggctccctgcggctgagctgcgccgcgagtggatttactttcagccgatatgggatgagttgggtgcggcaagctcccgggaagaggctggaatgggtctcaacaatctccggggggggcacttacatctattaccccgactcagtcaaggggagatttaccatttcacgagacaacgctaagaataccctgtatttgcagatgaattctctgagagcagaggacacagctgtttactattgtacccgcgacaactatggcaggaactacgactacggtatggactattggggacaagggacattggttacagtgagcagtggcggcgggggcagcggaggaggaggcagcggtggggggggcagcgagatagtgctcacgcagtcacccgcgactctcagtctctcacctggggaacgagctaccctgacgtgctctgctacctcctcagtgtcatatattcactggtatcagcaacggcccgggcagtcccctagattgctcatttatagtacctctaatctggcctcaggtatccctgcacgattttctggatctggttcaggttctgattacaccctcactatctctagcctggagcctgaagactttgccgtttattactgccagcagaggtctagctccccattcacctttgggagtgggaccaaggttgaaattaaa

SEQ ID NO: 342 - protein, 243 aa, Artificial Sequence; identical to SEQ ID NO: 233
  Humanized E6 scFV sequence in CAR

SEQ ID NO: 343 - DNA, 63 bp, Artificial Sequence
  CD8 leader sequence
atggccctgcccgtgaccgctttgctgctccccctggcgctgctgctgcacgccgccaggcca

SEQ ID NO: 344 - protein, 21 aa, Artificial Sequence
  CD8 leader sequence
MALPVTALLLPLALLLHAARP

SEQ ID NO: 345 - DNA, 135 bp, Artificial Sequence
  CD8 hinge domain sequence
acgacaaccccggcccccagaccaccaacgccagcccccaccatcgccagccaacccctgtctctgagaccagaagcctgtaggcctgccgccggtggagctgtgcacacaagaggactggatttcgcctgtgat

SEQ ID NO: 346 - protein, 45 aa, Artificial Sequence
  CD8 hinge domain sequence
TTTPAPRPPTPAPTIASQPLSLRPEACRPAAGGAVHTRGLDFACD

SEQ ID NO: 347 - DNA, 66 bp, Artificial Sequence
  CD4 hinge domain sequence
tcgggacaggtcctgctggaatccaacatcaaggttctgcccacatggtccaccccggtgcagcca

SEQ ID NO: 348 - protein, 22 aa, Artificial Sequence
  CD4 hinge domain sequence
SGQVLLESNIKVLPTWSTPVQP

SEQ ID NO: 349 - DNA, 45 bp, Artificial Sequence
  CD28 hinge domain sequence
aaacacctttgtccaagtcccctatttcccggaccttctaagccc

SEQ ID NO: 350 - protein, 15 aa, Artificial Sequence
  CD28 hinge domain sequence
KHLCPSPLFPGPSKP

SEQ ID NO: 351-360 - skipped (10 entries)

SEQ ID NO: 361 - DNA, 63 bp, Artificial Sequence
  CD3 zeta transmembrane domain sequence
ctctgctacctgctggatggaatcctcttcatctatggtgtcattctcactgccttgttcctg

SEQ ID NO: 362 - protein, 21 aa, Artificial Sequence
  CD3 zeta transmembrane domain sequence
LCYLLDGILFIYGVILTALFL

SEQ ID NO: 363 - DNA, 72 bp, Artificial Sequence
  CD8 transmembrane domain sequence
atctacatttgggccccgctcgcaggcacatgtggagtgctcctcctctccctggtgattaccctgtactgc

SEQ ID NO: 364 - protein, 24 aa, Artificial Sequence
  CD8 transmembrane domain sequence
IYIWAPLAGTCGVLLLSLVITLYC

SEQ ID NO: 365 - DNA, 66 bp, Artificial Sequence
  CD4 transmembrane domain sequence
atggccctgattgtgctggggggcgtcgccggcctcctgcttttcattgggctaggcatcttcttc

SEQ ID NO: 366 - protein, 22 aa, Artificial Sequence
  CD4 transmembrane domain sequence
MALIVLGGVAGLLLFIGLGIFF

SEQ ID NO: 367 - DNA, 81 bp, Artificial Sequence
  CD28 transmembrane domain sequence
ttttgggtgctggtggtggttggtggagtcctggcttgctatagcttgctagtaacagtggcctttattattttctgggtg

SEQ ID NO: 368 - protein, 27 aa, Artificial Sequence
  CD28 transmembrane domain sequence
FWVLVVVGGVLACYSLLVTVAFIIFWV

SEQ ID NO: 369 - DNA, 81 bp, Artificial Sequence
  41BB transmembrane domain sequence
atcatctccttctttcttgcgctgacgtcgactgcgttgctcttcctgctgttcttcctcacgctccgtttctctgttgtt

SEQ ID NO: 370 - protein, 27 aa, Artificial Sequence
  41BB transmembrane domain sequence
IISFFLALTSTALLFLLFFLTLRFSVV

SEQ ID NO: 371 - DNA, 78 bp, Artificial Sequence
  OX40 transmembrane domain sequence
gttgccgccatcctgggcctgggcctggtgctggggctgctgggccccctggccatcctgctggccctgtacctgctc

SEQ ID NO: 372 - protein, 26 aa, Artificial Sequence
  OX40 transmembrane domain sequence
VAAILGLGLVLGLLGPLAILLALYLL

SEQ ID NO: 373 - DNA, 336 bp, Artificial Sequence
  CD3 zeta domain sequence
cgcgttaagttctcccgatcagccgacgcgcctgcttacaagcagggccagaaccaactgtacaacgagctgaatctcggtagacgggaagagtacgacgtgttggacaaacggagaggccgcgacccagaaatgggcggcaagcctcgcaggaaaaacccccaggagggactgtacaatgagttgcagaaagataagatggcagaagcttatagcgagatcggaatgaagggggaaaggagacgagggaaaggacacgacggcctttatcagggcctgtccacagcaacaaaagatacgtatgacgccctccatatgcaggcacttccaccacgg

SEQ ID NO: 374 - protein, 112 aa, Artificial Sequence
  CD3 zeta domain sequence
RVKFSRSADAPAYKQGQNQLYNELNLGRREEYDVLDKRRGRDPEMGGKPRRKNPQEGLYNELQKDKMAEAYSEIGMKGERRRGKGHDGLYQGLSTATKDTYDALHMQALPPR

SEQ ID NO: 375 - DNA, 336 bp, Artificial Sequence
  CD3 zeta domain variant sequence
agagtgaagttcagcaggagcgcagacgcccccgcgtaccagcagggccagaaccagctctataacgagctcaatctaggacgaagagaggagtacgatgttttggacaagagacgtggccgggaccctgagatggggggaaagccgagaaggaagaaccctcaggaaggcctgtacaatgaactgcagaaagataagatggcggaggcctacagtgagattgggatgaaaggcgagcgccggaggggcaaggggcacgatggcctttaccagggtctcagtacagccaccaaggacacctacgacgcccttcacatgcaggccctgccccctcgc

SEQ ID NO: 376 - protein, 112 aa, Artificial Sequence
  CD3 zeta domain variant sequence
RVKFSRSADAPAYQQGQNQLYNELNLGRREEYDVLDKRRGRDPEMGGKPRRKNPQEGLYNELQKDKMAEAYSEIGMKGERRRGKGHDGLYQGLSTATKDTYDALHMQALPPR

SEQ ID NO: 377 - DNA, 123 bp, Artificial Sequence
  CD28 domain sequence
agaagcaagcggtctcggctcctgcattctgattacatgaacatgaccccaagaagaccaggccccaccaggaaacattaccagccctacgctccgccacgcgacttcgctgcctaccggtcc

SEQ ID NO: 378 - protein, 41 aa, Artificial Sequence
  CD28 domain sequence
RSKRSRLLHSDYMNMTPRRPGPTRKHYQPYAPPRDFAAYRS

SEQ ID NO: 379 - DNA, 126 bp, Artificial Sequence
  41BB domain sequence
aaaaggggccgcaaaaaactcctttacatttttaagcagccttttatgaggccagtacagacgactcaagaggaagacgggtgctcatgccgctttcctgaggaggaggaaggagggtgcgaactg

SEQ ID NO: 380 - protein, 42 aa, Artificial Sequence
  41BB domain sequence
KRGRKKLLYIFKQPFMRPVQTTQEEDGCSCRFPEEEEGGCEL

SEQ ID NO: 381-390 - skipped (10 entries)

SEQ ID NO: 391 - DNA, 729 bp, Artificial Sequence; identical to SEQ ID NO: 232
  HumanizeE6 scFV (VHVL) sequence

SEQ ID NO: 392 - protein, 243 aa, Artificial Sequence; identical to SEQ ID NO: 233
  HumanizeE6 scFV (VHVL) sequence

SEQ ID NO: 393 - DNA, 729 bp, Artificial Sequence
  HumanizeE6 scFV (VLVH) sequence
gaaattgtgttgacacagtctccagccaccctgtctttgtctccaggggaaagagccaccctcacctgcagcgccaccagcagtgttagctacatccactggtaccaacagaggcctggccagagccccaggctcctcatctatagcacctccaacctggccagcggcatcccagccaggttcagtggcagtgggtctgggagcgactacactctcaccatcagcagcctagagcctgaagattttgcagtttattactgtcagcagcgtagcagctcccctttcacctttggcagcggcaccaaagtggaaattaaaggcggtggcggatccggcggtggcggatccggcggtggcggatccgaggtgcagctggtggagtctgggggaggcctggtcaagcctggggggtccctgagactctcctgtgcagcctctggattcaccttcagtaggtatggcatgagctgggtccgccaggctccagggaagaggctggagtgggtctcaaccattagtggcggaggcacctacatatactacccagactcagtgaagggccgattcaccatctccagagacaacgccaagaacaccctgtatctgcaaatgaacagcctgagagccgaggacacggctgtgtattactgtaccagagataactatggccgcaactatgattatggcatggattattggggccagggcaccctggtgaccgtgagcagc

SEQ ID NO: 394 - protein, 243 aa, Artificial Sequence
  HumanizeE6 scFV (VLVH) sequence
EIVLTQSPATLSLSPGERATLTCSATSSVSYIHWYQQRPGQSPRLLIYSTSNLASGIPARFSGSGSGSDYTLTISSLEPEDFAVYYCQQRSSSPFTFGSGTKVEIKGGGGSGGGGSGGGGSEVQLVESGGGLVKPGGSLRLSCAASGFTFSRYGMSWVRQAPGKRLEWVSTISGGGTYIYYPDSVKGRFTISRDNAKNTLYLQMNSLRAEDTAVYYCTRDNYGRNYDYGMDYWGQGTLVTVSS

SEQ ID NO: 395 - DNA, 747 bp, Artificial Sequence; identical to SEQ ID NO: 238
  HumanizeC2 scFV (VHVL) sequence

SEQ ID NO: 396 - protein, 249 aa, Artificial Sequence; identical to SEQ ID NO: 239
  HumanizeC2 scFV (VHVL) sequence

SEQ ID NO: 397 - DNA, 747 bp, Artificial Sequence
  HumanizeE6 scFV (VLVH) sequence
gacattgtgctgacccagtctccagcctccttggccgtgtctccaggacagagggccaccatcacctgcagagccagtaagagtgtcagtaccagcggatactcctacatgcactggtatcagcagaaaccaggacaacctcctaaactcctgatttacctggcatccaatctggagagcggggtcccagccaggttcagcggcagtgggtctgggaccgatttcaccctcacaattaatcctgtggaagctaatgatactgcaaattattactgtcagcacagtagggagctgcctttcacattcggcggagggaccaaggtggagatcaaacgaactggcggtggcggatccggcggtggcggatccggcggtggcggatccgaggtgcagctggtggagtctgggggaggcctggtcaagcctggggggtccctgagactctcctgtgcagcctctggattcaccttcagtggctatgccatgagctgggtccgccaggctccagggaaggggctggagtgggtctcaaccattagtagtggcggaacctacatatactaccccgactcagtgaagggccgattcaccatctccagagacaacgccaagaactcactgtatctgcaaatgaacagcctgagagccgaggacacggccgtgtattactgtgcgagacttgggggggataattactacgaatacttcgatgtctggggcaaagggaccacggtcaccgtctcctcc

SEQ ID NO: 398 - protein, 249 aa, Artificial Sequence
  HumanizeE6 scFV (VLVH) sequence
DIVLTQSPASLAVSPGQRATITCRASKSVSTSGYSYMHWYQQKPGQPPKLLIYLASNLESGVPARFSGSGSGTDFTLTINPVEANDTANYYCQHSRELPFTFGGGTKVEIKRTGGGGSGGGGSGGGGSEVQLVESGGGLVKPGGSLRLSCAASGFTFSGYAMSWVRQAPGKGLEWVSTISSGGTYIYYPDSVKGRFTISRDNAKNSLYLQMNSLRAEDTAVYYCARLGGDNYYEYFDVWGKGTTVTVSS

SEQ ID NO: 399 - DNA, 15 bp, Artificial Sequence
  G4S1 linker sequence
ggcggtggcggatcc

SEQ ID NO: 400 - protein, 5 aa, Artificial Sequence
  G4S1 linker sequence
GGGGS

SEQ ID NO: 401 - DNA, 45 bp, Artificial Sequence
  [G4S1]x3 linker sequence
ggcggtggcggatccggcggtggcggatccggcggtggcggatcc

SEQ ID NO: 402 - protein, 15 aa, Artificial Sequence
  [G4S1]x3 linker sequence
GGGGSGGGGSGGGGS

SEQ ID NO: 403 - DNA, 24 bp, Artificial Sequence
  8 aa GS linker sequence
ggcggttccggcggtggatccgga

SEQ ID NO: 404 - protein, 8 aa, Artificial Sequence
  8 aa GS linker sequence
GGSGGGSG

SEQ ID NO: 405 - DNA, 39 bp, Artificial Sequence
  12 aa GS linker sequence
ggcggttccggcggtggatccggcggtggcggatccgga

SEQ ID NO: 406 - protein, 12 aa, Artificial Sequence
  12 aa GS linker sequence
GGSGGGSGGGSG

SEQ ID NO: 407 - DNA, 39 bp, Artificial Sequence
  13 aa GS linker sequence
ggcggtggatccggcggtggcggatccggcggtggatcc

SEQ ID NO: 408 - protein, 13 aa, Artificial Sequence
  13 aa GS linker sequence
GGGSGGGGSGGGS

SEQ ID NO: 409 - DNA, 66 bp, Artificial Sequence
  22 aa GS linker sequence
ggcggtggaagcggcggtggcggatccggcagcggcggaagcggcggtggcggatccggcggtgga

SEQ ID NO: 410 - protein, 22 aa, Artificial Sequence
  22 aa GS linker sequence
GGGSGGGGSGSGGSGGGGSGGG

SEQ ID NO: 411 - DNA, 78 bp, Artificial Sequence
  24 aa GS linker sequence
ggcggttccggcggtggatccggcggtggcggatccggaggcggttccggcggtggatccggcggtggcggatccgga

SEQ ID NO: 412 - protein, 24 aa, Artificial Sequence
  24 aa GS linker sequence
GGSGGGSGGGSGGGSGGGSGGGSG

SEQ ID NO: 413 - DNA, 357 bp, Artificial Sequence
  Mouse C3 Heavy chain variable region sequence
caggtccagctgcagcagtctgggcctgagctggtgaggcctggggtctcagtgaagatttcctgcaagggttccggctacagattcactgattatgctatgaactgggtgaagcagagtcatgcaaagagtctagagtggattggagttattagtactttctctggtaatacaaacttcaaccagaagtttaagggcaaggccacaatgactgtagacaaatcctccagcacagcctatatggaacttgccagattgacatctgaggattctgccatgtattactgtgcaagatcggattactacggcccatactttgactactggggccaaggcaccactctcacagtctcctca

SEQ ID NO: 414 - protein, 119 aa, Artificial Sequence
  Mouse C3 Heavy chain variable region sequence
QVQLQQSGPELVRPGVSVKISCKGSGYRFTDYAMNWVKQSHAKSLEWIGVISTFSGNTNFNQKFKGKATMTVDKSSSTAYMELARLTSEDSAMYYCARSDYYGPYFDYWGQGTTLTVSS

SEQ ID NO: 415 - DNA, 90 bp, Artificial Sequence
  Mouse C3 heavy chain variable framework region 1 (FWR1) sequence
caggtccagctgcagcagtctgggcctgagctggtgaggcctggggtctcagtgaagatttcctgcaagggttccggctacagattcact

SEQ ID NO: 416 - protein, 30 aa, Artificial Sequence
  Mouse C3 heavy chain variable framework region 1 (FWR1) sequence
QVQLQQSGPELVRPGVSVKISCKGSGYRFT

SEQ ID NO: 417 - DNA, 15 bp, Artificial Sequence
  Mouse C3 heavy chain variable complementarity determining regions 1 (CDR1) sequence
gattatgctatgaac

SEQ ID NO: 418 - protein, 5 aa, Artificial Sequence
  Mouse C3 heavy chain variable complementarity determining regions 1 (CDR1) sequence
DYAMN

SEQ ID NO: 419 - DNA, 42 bp, Artificial Sequence
  Mouse C3 heavy chain variable framework region 2 (FWR2) sequence
tgggtgaagcagagtcatgcaaagagtctagagtggattgga

SEQ ID NO: 420 - protein, 14 aa, Artificial Sequence
  Mouse C3 heavy chain variable framework region 2 (FWR2) sequence
WVKQSHAKSLEWIG

SEQ ID NO: 421 - DNA, 51 bp, Artificial Sequence
  Mouse C3 heavy chain variable complementarity determining regions 2 (CDR2) sequence
gttattagtactttctctggtaatacaaacttcaaccagaagtttaagggc

SEQ ID NO: 422 - protein, 17 aa, Artificial Sequence
  Mouse C3 heavy chain variable complementarity determining regions 2 (CDR2) sequence
VISTFSGNTNFNQKFKG

SEQ ID NO: 423 - DNA, 96 bp, Artificial Sequence
  Mouse C3 heavy chain variable framework region 3 (FWR3) acid sequence
aaggccacaatgactgtagacaaatcctccagcacagcctatatggaacttgccagattgacatctgaggattctgccatgtattactgtgcaaga

SEQ ID NO: 424 - protein, 32 aa, Artificial Sequence
  Mouse C3 heavy chain variable framework region 3 (FWR3) acid sequence
KATMTVDKSSSTAYMELARLTSEDSAMYYCAR

SEQ ID NO: 425 - DNA, 30 bp, Artificial Sequence
  Mouse C3 heavy chain variable complementarity determining regions 3 (CDR3) sequence
tcggattactacggcccatactttgactac

SEQ ID NO: 426 - protein, 10 aa, Artificial Sequence
  Mouse C3 heavy chain variable complementarity determining regions 3 (CDR3) sequence
SDYYGPYFDY

SEQ ID NO: 427-438 - skipped (12 entries)

SEQ ID NO: 439 - DNA, 357 bp, Artificial Sequence
  Humanized C3 heavy chain variable region sequence from IGHV118*04
caggttcagctggtgcagtctggagctgaggtgaagaagcctggggcctcagtgaaggtctcctgcaaggcttctggttacacctttaccgactacgccatgaactgggtgcgacaggcccctggacaagggcttgagtggatgggagtgatcagcaccttcagcggtaacacaaacttcaaccagaagttcaagggcagagtcaccatgaccacagacacatccacgagcacagcctacatggagctgaggagcctgagatctgacgacacggccgtgtattactgtgcgagaagcgactactacggcccatacttcgactactggggccagggcaccaccctgaccgtgtccagc

SEQ ID NO: 440 - protein, 119 aa, Artificial Sequence
  Humanized C3 heavy chain variable region sequence from IGHV118*04
QVQLVQSGAEVKKPGASVKVSCKASGYTFTDYAMNWVRQAPGQGLEWMGVISTFSGNTNFNQKFKGRVTMTTDTSTSTAYMELRSLRSDDTAVYYCARSDYYGPYFDYWGQGTTLTVSS

SEQ ID NO: 441 - DNA, 90 bp, Artificial Sequence
  Humanized C3 heavy chain variable framework region 1 (FWR1) acid sequence
caggttcagctggtgcagtctggagctgaggtgaagaagcctggggcctcagtgaaggtctcctgcaaggcttctggttacacctttacc

SEQ ID NO: 442 - protein, 30 aa, Artificial Sequence
  Humanized C3 heavy chain variable framework region 1 (FWR1) acid sequence
QVQLVQSGAEVKKPGASVKVSCKASGYTFT

SEQ ID NO: 443 - DNA, 15 bp, Artificial Sequence
  Humanized C3 heavy chain variable complementarity determining regions 1 (CDR1) sequence
gactacgccatgaac

SEQ ID NO: 444 - protein, 5 aa, Artificial Sequence
  Humanized C3 heavy chain variable complementarity determining regions 1 (CDR1) sequence
DYAMN

SEQ ID NO: 445 - DNA, 42 bp, Artificial Sequence
  Humanized C3 heavy chain variable framework region 2 (FWR2) acid sequence
tgggtgcgacaggcccctggacaagggcttgagtggatggga

SEQ ID NO: 446 - protein, 14 aa, Artificial Sequence
  Humanized C3 heavy chain variable framework region 2 (FWR2) acid sequence
WVRQAPGQGLEWMG

SEQ ID NO: 447 - DNA, 51 bp, Artificial Sequence
  Humanized C3 heavy chain variable complementarity determining regions 2 (CDR2) sequence
gtgatcagcaccttcagcggtaacacaaacttcaaccagaagttcaagggc

SEQ ID NO: 448 - protein, 17 aa, Artificial Sequence
  Humanized C3 heavy chain variable complementarity determining regions 2 (CDR2) sequence
VISTFSGNTNFNQKFKG

SEQ ID NO: 449 - DNA, 96 bp, Artificial Sequence
  Humanized C3 heavy chain variable framework region 3 (FWR3) acid sequence
agagtcaccatgaccacagacacatccacgagcacagcctacatggagctgaggagcctgagatctgacgacacggccgtgtattactgtgcgaga

SEQ ID NO: 450 - protein, 32 aa, Artificial Sequence
  Humanized C3 heavy chain variable framework region 3 (FWR3) acid sequence
RVTMTTDTSTSTAYMELRSLRSDDTAVYYCAR

SEQ ID NO: 451 - DNA, 30 bp, Artificial Sequence
  Humanized C3 heavy chain variable complementarity determining regions 3 (CDR3) sequence
agcgactactacggcccatacttcgactac

SEQ ID NO: 452 - protein, 10 aa, Artificial Sequence
  Humanized C3 heavy chain variable complementarity determining regions 3 (CDR3) sequence
SDYYGPYFDY

SEQ ID NO: 453 - DNA, 1353 bp, Artificial Sequence
  Humanized C3 IgG1 heavy chain sequence
caggttcagctggtgcagtctggagctgaggtgaagaagcctggggcctcagtgaaggtctcctgcaaggcttctggttacacctttaccgactacgccatgaactgggtgcgacaggcccctggacaagggcttgagtggatgggagtgatcagcaccttcagcggtaacacaaacttcaaccagaagttcaagggcagagtcaccatgaccacagacacatccacgagcacagcctacatggagctgaggagcctgagatctgacgacacggccgtgtattactgtgcgagaagcgactactacggcccatacttcgactactggggccagggcaccaccctgaccgtgtccagcgctagcaccaagggcccatcggtcttccccctggcaccctcctccaagagcacctctgggggcacagcggccctgggctgcctggtcaaggactacttccccgaaccggtgacggtgtcgtggaactcaggcgccctgaccagcggcgtgcacaccttcccggctgtcctacagtcctcaggactctactccctcagcagcgtggtgacagtgccctccagcagcttgggcacccagacctacatctgcaacgtgaatcacaagcccagcaacaccaaggtggacaagaaagttgagcccaaatcttgtgacaaaactcacacatgcccaccgtgcccagcacctgaactcctggggggaccgtcagtcttcctcttccccccaaaacccaaggacaccctcatgatctcccggacccctgaggtcacatgcgtggtggtggacgtgagccacgaagaccctgaggtcaagttcaactggtacgtggacggcgtggaggtgcataatgccaagacaaagccgcgggaggagcagtacaacagcacgtaccgtgtggtcagcgtcctcaccgtcctgcaccaggactggctgaatggcaaggagtacaagtgcaaggtctccaacaaagccctcccagcccccatcgagaaaaccatctccaaagccaaagggcagccccgagaaccacaggtgtacaccctgcccccatcccgggaggagatgaccaagaaccaggtcagcctgacctgcctggtcaaaggcttctatcccagcgacatcgccgtggagtgggagagcaatgggcagccggagaacaactacaagaccacgcctcccgtgctggactccgacggctccttcttcctctacagcaagctcaccgtggacaagagcaggtggcagcaggggaacgtcttctcatgctccgtgatgcatgaggctctgcacaaccactacacgcagaagagcctctccctgtctccgggtaaatgataa

SEQ ID NO: 454 - protein, 449 aa, Artificial Sequence
  Humanized C3 IgG1 heavy chain sequence
QVQLVQSGAEVKKPGASVKVSCKASGYTFTDYAMNWVRQAPGQGLEWMGVISTFSGNTNFNQKFKGRVTMTTDTSTSTAYMELRSLRSDDTAVYYCARSDYYGPYFDYWGQGTTLTVSSASTKGPSVFPLAPSSKSTSGGTAALGCLVKDYFPEPVTVSWNSGALTSGVHTFPAVLQSSGLYSLSSVVTVPSSSLGTQTYICNVNHKPSNTKVDKKVEPKSCDKTHTCPPCPAPELLGGPSVFLFPPKPKDTLMISRTPEVTCVVVDVSHEDPEVKFNWYVDGVEVHNAKTKPREEQYNSTYRVVSVLTVLHQDWLNGKEYKCKVSNKALPAPIEKTISKAKGQPREPQVYTLPPSREEMTKNQVSLTCLVKGFYPSDIAVEWESNGQPENNYKTTPPVLDSDGSFFLYSKLTVDKSRWQQGNVFSCSVMHEALHNHYTQKSLSLSPGK

SEQ ID NO: 455 - DNA, 1341 bp, Artificial Sequence
  Humanized C3 IgG2 heavy chain sequence
caggttcagctggtgcagtctggagctgaggtgaagaagcctggggcctcagtgaaggtctcctgcaaggcttctggttacacctttaccgactacgccatgaactgggtgcgacaggcccctggacaagggcttgagtggatgggagtgatcagcaccttcagcggtaacacaaacttcaaccagaagttcaagggcagagtcaccatgaccacagacacatccacgagcacagcctacatggagctgaggagcctgagatctgacgacacggccgtgtattactgtgcgagaagcgactactacggcccatacttcgactactggggccagggcaccaccctgaccgtgtccagcgcctccaccaagggcccatcggtcttccccctggcgccctgctccaggagcacctccgagagcacagccgccctgggctgcctggtcaaggactacttccccgaaccggtgacggtgtcgtggaactcaggcgctctgaccagcggcgtgcacaccttcccagctgtcctacagtcctcaggactctactccctcagcagcgtggtgaccgtgccctccagcaacttcggcacccagacctacacctgcaacgtagatcacaagcccagcaacaccaaggtggacaagacagttgagcgcaaatgttgtgtcgagtgcccaccgtgcccagcaccacctgtggcaggaccgtcagtcttcctcttccccccaaaacccaaggacaccctcatgatctcccggacccctgaggtcacgtgcgtggtggtggacgtgagccacgaagaccccgaggtccagttcaactggtacgtggacggcgtggaggtgcataatgccaagacaaagccacgggaggagcagttcaacagcacgttccgtgtggtcagcgtcctcaccgttgtgcaccaggactggctgaacggcaaggagtacaagtgcaaggtctccaacaaaggcctcccagcccccatcgagaaaaccatctccaaaaccaaagggcagccccgagaaccacaggtgtacaccctgcccccatcccgggaggagatgaccaagaaccaggtcagcctgacctgcctggtcaaaggcttctaccccagcgacatcgccgtggagtgggagagcaatgggcagccggagaacaactacaagaccacacctcccatgctggactccgacggctccttcttcctctacagcaagctcaccgtggacaagagcaggtggcagcaggggaacgtcttctcatgctccgtgatgcatgaggctctgcacaaccactacacgcagaagagcctctccctgtctccgggtaaatagtaa

SEQ ID NO: 456 - protein, 445 aa, Artificial Sequence
  Humanized C3 IgG2 heavy chain sequence
QVQLVQSGAEVKKPGASVKVSCKASGYTFTDYAMNWVRQAPGQGLEWMGVISTFSGNTNFNQKFKGRVTMTTDTSTSTAYMELRSLRSDDTAVYYCARSDYYGPYFDYWGQGTTLTVSSASTKGPSVFPLAPCSRSTSESTAALGCLVKDYFPEPVTVSWNSGALTSGVHTFPAVLQSSGLYSLSSVVTVPSSNFGTQTYTCNVDHKPSNTKVDKTVERKCCVECPPCPAPPVAGPSVFLFPPKPKDTLMISRTPEVTCVVVDVSHEDPEVQFNWYVDGVEVHNAKTKPREEQFNSTFRVVSVLTVVHQDWLNGKEYKCKVSNKGLPAPIEKTISKTKGQPREPQVYTLPPSREEMTKNQVSLTCLVKGFYPSDIAVEWESNGQPENNYKTTPPMLDSDGSFFLYSKLTVDKSRWQQGNVFSCSVMHEALHNHYTQKSLSLSPGK

SEQ ID NO: 457 - skipped

SEQ ID NO: 458 - DNA, 336 bp, Artificial Sequence
  Mouse C3 Light Chain variable region sequence
gatgttttgatgacccaaactccactctccctgcctgtcagtcttggagatcaagcctccatctcttgcagatctagtcagaccattgtacatagtaatggaaacacctatttagaatggtacctgcagaaaccaggccagtctccaaagctcctgatctacaaagtttccaaccgattttctggggtcccagacaggttcagtggcagtggatcagggacagatttcacactcaagatcaacagagtggaggctgaggatctgggagtttattactgctttcaaggttcacatgttccattcacgttcggctcggggacaaagttggaaataaaa

SEQ ID NO: 459 - protein, 112 aa, Artificial Sequence
  Mouse C3 Light Chain variable region sequence
DVLMTQTPLSLPVSLGDQASISCRSSQTIVHSNGNTYLEWYLQKPGQSPKLLIYKVSNRFSGVPDRFSGSGSGTDFTLKINRVEAEDLGVYYCFQGSHVPFTFGSGTKLEIK

SEQ ID NO: 460 - DNA, 69 bp, Artificial Sequence
  Mouse C3 light chain variable framework region 1 (FWR1) sequence
gatgttttgatgacccaaactccactctccctgcctgtcagtcttggagatcaagcctccatctcttgc

SEQ ID NO: 461 - protein, 23 aa, Artificial Sequence
  Mouse C3 light chain variable framework region 1 (FWR1) sequence
DVLMTQTPLSLPVSLGDQASISC

SEQ ID NO: 462 - DNA, 48 bp, Artificial Sequence
  Mouse C3 light chain variable complementarity determining regions 1 (CDR1) sequence
agatctagtcagaccattgtacatagtaatggaaacacctatttagaa

SEQ ID NO: 463 - protein, 16 aa, Artificial Sequence
  Mouse C3 light chain variable complementarity determining regions 1 (CDR1) sequence
RSSQTIVHSNGNTYLE

SEQ ID NO: 464 - DNA, 45 bp, Artificial Sequence
  Mouse C3 light chain variable framework region 2 (FWR2) sequence
tggtacctgcagaaaccaggccagtctccaaagctcctgatctac

SEQ ID NO: 465 - protein, 15 aa, Artificial Sequence
  Mouse C3 light chain variable framework region 2 (FWR2) sequence
WYLQKPGQSPKLLIY

SEQ ID NO: 466 - DNA, 21 bp, Artificial Sequence
  Mouse C3 light chain variable complementarity determining regions 2 (CDR2) sequence
aaagtttccaaccgattttct

SEQ ID NO: 467 - protein, 7 aa, Artificial Sequence
  Mouse C3 light chain variable complementarity determining regions 2 (CDR2) sequence
KVSNRFS

SEQ ID NO: 468 - DNA, 96 bp, Artificial Sequence
  Mouse C3 light chain variable framework region 3 (FWR3) sequence
ggggtcccagacaggttcagtggcagtggatcagggacagatttcacactcaagatcaacagagtggaggctgaggatctgggagtttattactgc

SEQ ID NO: 469 - protein, 32 aa, Artificial Sequence
  Mouse C3 light chain variable framework region 3 (FWR3) sequence
GVPDRFSGSGSGTDFTLKINRVEAEDLGVYYC

SEQ ID NO: 470 - DNA, 27 bp, Artificial Sequence
  Mouse C3 light chain variable complementarity determining regions 3 (CDR3) sequence
tttcaaggttcacatgttccattcacg

SEQ ID NO: 471 - protein, 9 aa, Artificial Sequence
  Mouse C3 light chain variable complementarity determining regions 3 (CDR3) sequence
FQGSHVPFT

SEQ ID NO: 472-485 - skipped (14 entries)

SEQ ID NO: 486 - DNA, 342 bp, Artificial Sequence
  Humanized C3 light chain variable region sequence from IGKV229*03
gatattgtgatgacccagactccactctctctgtccgtcacccctggacagccggcctccatctcctgcaggtctagtcagaccattgtccatagtaatggaaacacctatttggagtggtacctgcagaagccaggccagtctccacagctcctgatctataaggtttccaaccggttctctggagtgccagataggttcagtggcagcgggtcagggacagatttcacactgaaaatcagccgggtggaggctgaggatgttggggtttattactgcttccaaggtagccacgtgcctttcaccttcggcggagggaccaaggtggagatcaaacgaact

SEQ ID NO: 487 - protein, 114 aa, Artificial Sequence
  Humanized C3 light chain variable region sequence from IGKV229*03
DIVMTQTPLSLSVTPGQPASISCRSSQTIVHSNGNTYLEWYLQKPGQSPQLLIYKVSNRFSGVPDRFSGSGSGTDFTLKISRVEAEDVGVYYCFQGSHVPFTFGGGTKVEIKRT

SEQ ID NO: 488 - DNA, 69 bp, Artificial Sequence
  Humanized C3 light chain variable framework region 1 (FWR1) acid sequence
gatattgtgatgacccagactccactctctctgtccgtcacccctggacagccggcctccatctcctgc

SEQ ID NO: 489 - protein, 23 aa, Artificial Sequence
  Humanized C3 light chain variable framework region 1 (FWR1) acid sequence
DIVMTQTPLSLSVTPGQPASISC

SEQ ID NO: 490 - DNA, 47 bp, Artificial Sequence
  Humanized C3 light chain variable complementarity determining regions 1 (CDR1) sequence
ggtctagtcagaccattgtccatagtaatggaaacacctatttggag

SEQ ID NO: 491 - protein, 16 aa, Artificial Sequence
  Humanized C3 light chain variable complementarity determining regions 1 (CDR1) sequence
RSSQTIVHSNGNTYLE

SEQ ID NO: 492 - DNA, 45 bp, Artificial Sequence
  Humanized C3 light chain variable framework region 2 (FWR2) acid sequence
tggtacctgcagaagccaggccagtctccacagctcctgatctat

SEQ ID NO: 493 - protein, 15 aa, Artificial Sequence
  Humanized C3 light chain variable framework region 2 (FWR2) acid sequence
WYLQKPGQSPQLLIY

SEQ ID NO: 494 - DNA, 21 bp, Artificial Sequence
  Humanized C3 light chain variable complementarity determining regions 2 (CDR2) sequence
aaggtttccaaccggttctct

SEQ ID NO: 495 - protein, 7 aa, Artificial Sequence
  Humanized C3 light chain variable complementarity determining regions 2 (CDR2) sequence
KVSNRFS

SEQ ID NO: 496 - DNA, 96 bp, Artificial Sequence
  Humanized C3 light chain variable framework region 3 (FWR3) acid sequence
ggagtgccagataggttcagtggcagcgggtcagggacagatttcacactgaaaatcagccgggtggaggctgaggatgttggggtttattactgc

SEQ ID NO: 497 - protein, 32 aa, Artificial Sequence
  Humanized C3 light chain variable framework region 3 (FWR3) acid sequence
GVPDRFSGSGSGTDFTLKISRVEAEDVGVYYC

SEQ ID NO: 498 - DNA, 27 bp, Artificial Sequence
  Humanized C3 light chain variable complementarity determining regions 3 (CDR3) sequence
ttccaaggtagccacgtgcctttcacc

SEQ ID NO: 499 - protein, 9 aa, Artificial Sequence
  Humanized C3 light chain variable complementarity determining regions 3 (CDR3) sequence
FQGSHVPFT

SEQ ID NO: 500 - DNA, 666 bp, Artificial Sequence
  Humanized C3 lambda light chain sequence
gatattgtgatgacccagactccactctctctgtccgtcacccctggacagccggcctccatctcctgcaggtctagtcagaccattgtccatagtaatggaaacacctatttggagtggtacctgcagaagccaggccagtctccacagctcctgatctataaggtttccaaccggttctctggagtgccagataggttcagtggcagcgggtcagggacagatttcacactgaaaatcagccgggtggaggctgaggatgttggggtttattactgcttccaaggtagccacgtgcctttcaccttcggcggagggaccaaggtggagatcaaacgaactggtcagcccaaggctgccccctcggtcactctgttcccgccctcctctgaggagcttcaagccaacaaggccacactggtgtgtctcataagtgacttctacccgggagccgtgacagtggcctggaaggcagatagcagccccgtcaaggcgggagtggagaccaccacaccctccaaacaaagcaacaacaagtacgcggccagcagctatctgagcctgacgcctgagcagtggaagtcccacagaagctacagctgccaggtcacgcatgaagggagcaccgtggagaagacagtggcccctacagaatgttcatagtaa

SEQ ID NO: 501 - protein, 220 aa, Artificial Sequence
  Humanized C3 lambda light chain sequence
DIVMTQTPLSLSVTPGQPASISCRSSQTIVHSNGNTYLEWYLQKPGQSPQLLIYKVSNRFSGVPDRFSGSGSGTDFTLKISRVEAEDVGVYYCFQGSHVPFTFGGGTKVEIKRTGQPKAAPSVTLFPPSSEELQANKATLVCLISDFYPGAVTVAWKADSSPVKAGVETTTPSKQSNNKYAASSYLSLTPEQWKSHRSYSCQVTHEGSTVEKTVAPTECS

SEQ ID NO: 502 - DNA, 666 bp, Artificial Sequence
  Humanized C3 Kappa light chain
gatattgtgatgacccagactccactctctctgtccgtcacccctggacagccggcctccatctcctgcaggtctagtcagaccattgtccatagtaatggaaacacctatttggagtggtacctgcagaagccaggccagtctccacagctcctgatctataaggtttccaaccggttctctggagtgccagataggttcagtggcagcgggtcagggacagatttcacactgaaaatcagccgggtggaggctgaggatgttggggtttattactgcttccaaggtagccacgtgcctttcaccttcggcggagggaccaaggtggagatcaaacgaactacggtggctgcaccatctgtcttcatcttcccgccatctgatgagcagttgaaatctggaactgcctctgttgtgtgcctgctgaataacttctatcccagagaggccaaagtacagtggaaggtggataacgccctccaatcgggtaactcccaggagagtgtcacagagcaggacagcaaggacagcacctacagcctcagcagcaccctgacgctgagcaaagcagactacgagaaacacaaagtctacgcctgcgaagtcacccatcagggcctgagctcgcccgtcacaaagagcttcaacaggggagagtgttagtaa

SEQ ID NO: 503 - protein, 220 aa, Artificial Sequence
  Humanized C3 Kappa light chain
DIVMTQTPLSLSVTPGQPASISCRSSQTIVHSNGNTYLEWYLQKPGQSPQLLIYKVSNRFSGVPDRFSGSGSGTDFTLKISRVEAEDVGVYYCFQGSHVPFTFGGGTKVEIKRTTVAAPSVFIFPPSDEQLKSGTASVVCLLNNFYPREAKVQWKVDNALQSGNSQESVTEQDSKDSTYSLSSTLTLSKADYEKHKVYACEVTHQGLSSPVTKSFNRGEC

SEQ ID NO: 504 - skipped

SEQ ID NO: 505 - DNA, 321 bp, Artificial Sequence
  Mouse C8 heavy chain variable region sequence
gaagtgatggtcgtggaaagcggcggtggtctggtaaagccggggggatcccttaagctttcttgcgccgcatccgggttcacgttctccggctatgccatgtcctgggtccgacagactcccgaaaagcgcttggaatgggtggccactatctcctccggggggacgtacatctactaccccgacagtgtgaaaggaagatttacaatatctcgcgacaacgcaaaaaataccttgtatcttcaaatgagctccctgcggtcagaggacactgccatgtactattgcgcccgcctgggcggcgacaattactatgagtat

SEQ ID NO: 506 - protein, 107 aa, Artificial Sequence
  Mouse C8 heavy chain variable region sequence
EVMVVESGGGLVKPGGSLKLSCAASGFTFSGYAMSWVRQTPEKRLEWVATISSGGTYIYYPDSVKGRFTISRDNAKNTLYLQMSSLRSEDTAMYYCARLGGDNYYEY

SEQ ID NO: 507 - DNA, 15 bp, Artificial Sequence
  Mouse C8 heavy chain variable complementarity determining region 1 (CDR1) sequence
ggctatgccatgtcc

SEQ ID NO: 508 - protein, 5 aa, Artificial Sequence
  Mouse C8 heavy chain variable complementarity determining region 1 (CDR1) sequence
GYAMS

SEQ ID NO: 509 - DNA, 51 bp, Artificial Sequence
  Mouse C8 heavy chain variable complementarity determining region 2 (CDR2) sequence
actatctcctccggggggacgtacatctactaccccgacagtgtgaaagga

SEQ ID NO: 510 - protein, 17 aa, Artificial Sequence
  Mouse C8 heavy chain variable complementarity determining region 2 (CDR2) sequence
TISSGGTYIYYPDSVKG

SEQ ID NO: 511 - DNA, 27 bp, Artificial Sequence
  Mouse C8 heavy chain variable complementarity determining region 3 (CDR3) sequence
ctgggcggcgacaattactatgagtat

SEQ ID NO: 512 - protein, 9 aa, Artificial Sequence
  Mouse C8 heavy chain variable complementarity determining region 3 (CDR3) sequence
LGGDNYYEY

SEQ ID NO: 513-524 - skipped (12 entries)

SEQ ID NO: 525 - DNA, 354 bp, Artificial Sequence
  Humanized C8 heavy chain variable region sequence from IGHV321*04
gaggtgcagctggtggagtctgggggaggcctggtcaagcctggggggtccctgagactctcctgtgcagcctctggattcaccttcagtggctatgccatgagctgggtccgccaggctccagggaaggggctggagtgggtctcaaccattagtagtggcggaacctacatatactaccctgactcagtgaagggccgattcaccatctccagagacaacgccaagaactcactgtatctgcaaatgaacagcctgagagccgaggacacggccgtgtattactgtgcgagactgggcggcgataactattatgaatattggggcaaagggaccacggtcaccgtctcctcc

SEQ ID NO: 526 - protein, 118 aa, Artificial Sequence
  Humanized C8 heavy chain variable region sequence from IGHV321*04
EVQLVESGGGLVKPGGSLRLSCAASGFTFSGYAMSWVRQAPGKGLEWVSTISSGGTYIYYPDSVKGRFTISRDNAKNSLYLQMNSLRAEDTAVYYCARLGGDNYYEYWGKGTTVTVSS

SEQ ID NO: 527 - DNA, 90 bp, Artificial Sequence; identical to SEQ ID NO: 40
  Humanized C8 heavy chain variable framework region 1 (FWR1) sequence

SEQ ID NO: 528 - protein, 30 aa, Artificial Sequence; identical to SEQ ID NO: 41
  Humanized C8 heavy chain variable framework region 1 (FWR1) sequence

SEQ ID NO: 529 - DNA, 15 bp, Artificial Sequence
  Humanized C8 heavy chain variable complementarity determining region 1 (CDR1) sequence
ggctatgccatgagc

SEQ ID NO: 530 - protein, 5 aa, Artificial Sequence
  Humanized C8 heavy chain variable complementarity determining region 1 (CDR1) sequence
GYAMS

SEQ ID NO: 531 - DNA, 42 bp, Artificial Sequence
  Humanized C8 heavy chain variable framework region 2 (FWR2) sequence
tgggtccgccaggctccagggaaggggctggagtgggtctca

SEQ ID NO: 532 - protein, 14 aa, Artificial Sequence
  Humanized C8 heavy chain variable framework region 2 (FWR2) sequence
WVRQAPGKGLEWVS

SEQ ID NO: 533 - DNA, 51 bp, Artificial Sequence
  Humanized C8 heavy chain variable complementarity determining region 2 (CDR2) sequence
accattagtagtggcggaacctacatatactaccctgactcagtgaagggc

SEQ ID NO: 534 - protein, 17 aa, Artificial Sequence
  Humanized C8 heavy chain variable complementarity determining region 2 (CDR2) sequence
TISSGGTYIYYPDSVKG

SEQ ID NO: 535 - DNA, 96 bp, Artificial Sequence; identical to SEQ ID NO: 154
  Humanized C8 heavy chain variable framework region 3 (FWR3) sequence

SEQ ID NO: 536 - protein, 32 aa, Artificial Sequence; identical to SEQ ID NO: 155
  Humanized C8 heavy chain variable framework region 3 (FWR3) sequence

SEQ ID NO: 537 - DNA, 27 bp, Artificial Sequence
  Humanized C8 heavy chain variable complementarity determining region 3 (CDR3) sequence
ctgggcggcgataactattatgaatat

SEQ ID NO: 538 - protein, 9 aa, Artificial Sequence
  Humanized C8 heavy chain variable complementarity determining region 3 (CDR3) sequence
LGGDNYYEY

SEQ ID NO: 539 - DNA, 1350 bp, Artificial Sequence
  Humanized C8 IgG1 heavy chain sequence
gaggtgcagctggtggagtctgggggaggcctggtcaagcctggggggtccctgagactctcctgtgcagcctctggattcaccttcagtggctatgccatgagctgggtccgccaggctccagggaaggggctggagtgggtctcaaccattagtagtggcggaacctacatatactaccctgactcagtgaagggccgattcaccatctccagagacaacgccaagaactcactgtatctgcaaatgaacagcctgagagccgaggacacggccgtgtattactgtgcgagactgggcggcgataactattatgaatattggggcaaagggaccacggtcaccgtctcctccgctagcaccaagggcccatcggtcttccccctggcaccctcctccaagagcacctctgggggcacagcggccctgggctgcctggtcaaggactacttccccgaaccggtgacggtgtcgtggaactcaggcgccctgaccagcggcgtgcacaccttcccggctgtcctacagtcctcaggactctactccctcagcagcgtggtgacagtgccctccagcagcttgggcacccagacctacatctgcaacgtgaatcacaagcccagcaacaccaaggtggacaagaaagttgagcccaaatcttgtgacaaaactcacacatgcccaccgtgcccagcacctgaactcctggggggaccgtcagtcttcctcttccccccaaaacccaaggacaccctcatgatctcccggacccctgaggtcacatgcgtggtggtggacgtgagccacgaagaccctgaggtcaagttcaactggtacgtggacggcgtggaggtgcataatgccaagacaaagccgcgggaggagcagtacaacagcacgtaccgtgtggtcagcgtcctcaccgtcctgcaccaggactggctgaatggcaaggagtacaagtgcaaggtctccaacaaagccctcccagcccccatcgagaaaaccatctccaaagccaaagggcagccccgagaaccacaggtgtacaccctgcccccatcccgggaggagatgaccaagaaccaggtcagcctgacctgcctggtcaaaggcttctatcccagcgacatcgccgtggagtgggagagcaatgggcagccggagaacaactacaagaccacgcctcccgtgctggactccgacggctccttcttcctctacagcaagctcaccgtggacaagagcaggtggcagcaggggaacgtcttctcatgctccgtgatgcatgaggctctgcacaaccactacacgcagaagagcctctccctgtctccgggtaaatgataa

SEQ ID NO: 540 - protein, 448 aa, Artificial Sequence
  Humanized C8 IgG1 heavy chain sequence
EVQLVESGGGLVKPGGSLRLSCAASGFTFSGYAMSWVRQAPGKGLEWVSTISSGGTYIYYPDSVKGRFTISRDNAKNSLYLQMNSLRAEDTAVYYCARLGGDNYYEYWGKGTTVTVSSASTKGPSVFPLAPSSKSTSGGTAALGCLVKDYFPEPVTVSWNSGALTSGVHTFPAVLQSSGLYSLSSVVTVPSSSLGTQTYICNVNHKPSNTKVDKKVEPKSCDKTHTCPPCPAPELLGGPSVFLFPPKPKDTLMISRTPEVTCVVVDVSHEDPEVKFNWYVDGVEVHNAKTKPREEQYNSTYRVVSVLTVLHQDWLNGKEYKCKVSNKALPAPIEKTISKAKGQPREPQVYTLPPSREEMTKNQVSLTCLVKGFYPSDIAVEWESNGQPENNYKTTPPVLDSDGSFFLYSKLTVDKSRWQQGNVFSCSVMHEALHNHYTQKSLSLSPGK

SEQ ID NO: 541 - DNA, 1338 bp, Artificial Sequence
  Humanized C8 IgG2 heavy chain sequence
gaggtgcagctggtggagtctgggggaggcctggtcaagcctggggggtccctgagactctcctgtgcagcctctggattcaccttcagtggctatgccatgagctgggtccgccaggctccagggaaggggctggagtgggtctcaaccattagtagtggcggaacctacatatactaccctgactcagtgaagggccgattcaccatctccagagacaacgccaagaactcactgtatctgcaaatgaacagcctgagagccgaggacacggccgtgtattactgtgcgagactgggcggcgataactattatgaatattggggcaaagggaccacggtcaccgtctcctccgcctccaccaagggcccatcggtcttccccctggcgccctgctccaggagcacctccgagagcacagccgccctgggctgcctggtcaaggactacttccccgaaccggtgacggtgtcgtggaactcaggcgctctgaccagcggcgtgcacaccttcccagctgtcctacagtcctcaggactctactccctcagcagcgtggtgaccgtgccctccagcaacttcggcacccagacctacacctgcaacgtagatcacaagcccagcaacaccaaggtggacaagacagttgagcgcaaatgttgtgtcgagtgcccaccgtgcccagcaccacctgtggcaggaccgtcagtcttcctcttccccccaaaacccaaggacaccctcatgatctcccggacccctgaggtcacgtgcgtggtggtggacgtgagccacgaagaccccgaggtccagttcaactggtacgtggacggcgtggaggtgcataatgccaagacaaagccacgggaggagcagttcaacagcacgttccgtgtggtcagcgtcctcaccgttgtgcaccaggactggctgaacggcaaggagtacaagtgcaaggtctccaacaaaggcctcccagcccccatcgagaaaaccatctccaaaaccaaagggcagccccgagaaccacaggtgtacaccctgcccccatcccgggaggagatgaccaagaaccaggtcagcctgacctgcctggtcaaaggcttctaccccagcgacatcgccgtggagtgggagagcaatgggcagccggagaacaactacaagaccacacctcccatgctggactccgacggctccttcttcctctacagcaagctcaccgtggacaagagcaggtggcagcaggggaacgtcttctcatgctccgtgatgcatgaggctctgcacaaccactacacgcagaagagcctctccctgtctccgggtaaatagtaa

SEQ ID NO: 542 - protein, 444 aa, Artificial Sequence
  Humanized C8 IgG2 heavy chain sequence
EVQLVESGGGLVKPGGSLRLSCAASGFTFSGYAMSWVRQAPGKGLEWVSTISSGGTYIYYPDSVKGRFTISRDNAKNSLYLQMNSLRAEDTAVYYCARLGGDNYYEYWGKGTTVTVSSASTKGPSVFPLAPCSRSTSESTAALGCLVKDYFPEPVTVSWNSGALTSGVHTFPAVLQSSGLYSLSSVVTVPSSNFGTQTYTCNVDHKPSNTKVDKTVERKCCVECPPCPAPPVAGPSVFLFPPKPKDTLMISRTPEVTCVVVDVSHEDPEVQFNWYVDGVEVHNAKTKPREEQFNSTFRVVSVLTVVHQDWLNGKEYKCKVSNKGLPAPIEKTISKTKGQPREPQVYTLPPSREEMTKNQVSLTCLVKGFYPSDIAVEWESNGQPENNYKTTPPMLDSDGSFFLYSKLTVDKSRWQQGNVFSCSVMHEALHNHYTQKSLSLSPGK

SEQ ID NO: 543 - DNA, 306 bp, Artificial Sequence
  Mouse C8 light chain variable region sequence
gacatcgtcattacgcagacccctgccagtcttgccgtttctctgggccagagggccactatcagttacagggcgagtaagtctgtgagtaccagcggctatagttacatgcattggaaccagcagaaaccgggacagccaccacgcctgcttatttatctggtgtctaatcttgagtccggggtgcccgccaggttcagcggcagcggctctgggaccgacttcacactcaacattcatccagtggaagaagaggacgctgctacatactactgtcaacacattcgggaactgaccaggagtgaa

SEQ ID NO: 544 - protein, 102 aa, Artificial Sequence
  Mouse C8 light chain variable region sequence
DIVITQTPASLAVSLGQRATISYRASKSVSTSGYSYMHWNQQKPGQPPRLLIYLVSNLESGVPARFSGSGSGTDFTLNIHPVEEEDAATYYCQHIRELTRSE

SEQ ID NO: 545 - DNA, 45 bp, Artificial Sequence
  Mouse C8 light chain variable complementarity determining region 1 (CDR1) sequence
agggcgagtaagtctgtgagtaccagcggctatagttacatgcat

SEQ ID NO: 546 - protein, 15 aa, Artificial Sequence
  Mouse C8 light chain variable complementarity determining region 1 (CDR1) sequence
RASKSVSTSGYSYMH

SEQ ID NO: 547 - DNA, 21 bp, Artificial Sequence
  Mouse C8 light chain variable complementarity determining region 2 (CDR2) sequence
ctggtgtctaatcttgagtcc

SEQ ID NO: 548 - protein, 7 aa, Artificial Sequence
  Mouse C8 light chain variable complementarity determining region 2 (CDR2) sequence
LVSNLES

SEQ ID NO: 549 - DNA, 30 bp, Artificial Sequence
  Mouse C8 light chain variable complementarity determining region 3 (CDR3) sequence
caacacattcgggaactgaccaggagtgaa

SEQ ID NO: 550 - protein, 10 aa, Artificial Sequence
  Mouse C8 light chain variable complementarity determining region 3 (CDR3) sequence
QHIRELTRSE

SEQ ID NO: 551-564 - skipped (14 entries)

SEQ ID NO: 565 - DNA, 342 bp, Artificial Sequence
  Humanized C8 light chain variable region sequence from NCBI germline z00023
gacatcgtgatgacccagtctccagactccctggctgtgtctctgggcgagagggccaccatcaactgcagggccagcaagagtgttagcaccagcggctacagctacatgcactggtaccagcagaaaccaggacagcctcctaagctgctcatttacctggtgtctaacctggaatccggggtccctgaccgattcagtggcagcgggtctgggacagatttcactctcaccatcagcagcctgcaggctgaagatgtggcagtttattactgtcaacacattcgggaactgaccaggagtgaattcggcggagggaccaaggtggagatcaaacgaact

SEQ ID NO: 566 - protein, 114 aa, Artificial Sequence
  Humanized C8 light chain variable region sequence from NCBI germline z00023
DIVMTQSPDSLAVSLGERATINCRASKSVSTSGYSYMHWYQQKPGQPPKLLIYLVSNLESGVPDRFSGSGSGTDFTLTISSLQAEDVAVYYCQHIRELTRSEFGGGTKVEIKRT

SEQ ID NO: 567 - DNA, 69 bp, Artificial Sequence
  Humanized C8 light chain variable framework region 1 (FWR1) sequence
gacatcgtgatgacccagtctccagactccctggctgtgtctctgggcgagagggccaccatcaactgc

SEQ ID NO: 568 - protein, 23 aa, Artificial Sequence
  Humanized C8 light chain variable framework region 1 (FWR1) sequence
DIVMTQSPDSLAVSLGERATINC

SEQ ID NO: 569 - DNA, 42 bp, Artificial Sequence
  Humanized C8 light chain variable complementarity determining region 1 (CDR1) sequence
agggccagcaagagtgttagcaccagcggctacagctacatg

SEQ ID NO: 570 - protein, 14 aa, Artificial Sequence
  Humanized C8 light chain variable complementarity determining region 1 (CDR1) sequence
RASKSVSTSGYSYM

SEQ ID NO: 571 - DNA, 48 bp, Artificial Sequence
  Humanized C8 light chain variable framework region 2 (FWR2) sequence
cactggtaccagcagaaaccaggacagcctcctaagctgctcatttac

SEQ ID NO: 572 - protein, 16 aa, Artificial Sequence
  Humanized C8 light chain variable framework region 2 (FWR2) sequence
HWYQQKPGQPPKLLIY

SEQ ID NO: 573 - DNA, 21 bp, Artificial Sequence
  Humanized C8 light chain variable complementarity determining region 2 (CDR2) sequence
ctggtgtctaacctggaatcc

SEQ ID NO: 574 - protein, 7 aa, Artificial Sequence
  Humanized C8 light chain variable complementarity determining region 2 (CDR2) sequence
LVSNLES

SEQ ID NO: 575 - DNA, 96 bp, Artificial Sequence
  Humanized C8 light chain variable framework region 3 (FWR3) sequence
ggggtccctgaccgattcagtggcagcgggtctgggacagatttcactctcaccatcagcagcctgcaggctgaagatgtggcagtttattactgt

SEQ ID NO: 576 - protein, 32 aa, Artificial Sequence
  Humanized C8 light chain variable framework region 3 (FWR3) sequence
GVPDRFSGSGSGTDFTLTISSLQAEDVAVYYC

SEQ ID NO: 577 - DNA, 30 bp, Artificial Sequence; identical to SEQ ID NO: 549
  Humanized C8 light chain variable complementarity determining region 3 (CDR3) sequence

SEQ ID NO: 578 - protein, 10 aa, Artificial Sequence
  Humanized C8 light chain variable complementarity determining region 3 (CDR3) sequence
QHIRELTRSE

SEQ ID NO: 579 - DNA, 666 bp, Artificial Sequence
  Humanized C8 Lambda light chain sequence
gacatcgtgatgacccagtctccagactccctggctgtgtctctgggcgagagggccaccatcaactgcagggccagcaagagtgttagcaccagcggctacagctacatgcactggtaccagcagaaaccaggacagcctcctaagctgctcatttacctggtgtctaacctggaatccggggtccctgaccgattcagtggcagcgggtctgggacagatttcactctcaccatcagcagcctgcaggctgaagatgtggcagtttattactgtcaacacattcgggaactgaccaggagtgaattcggcggagggaccaaggtggagatcaaacgaactggtcagcccaaggctgccccctcggtcactctgttcccgccctcctctgaggagcttcaagccaacaaggccacactggtgtgtctcataagtgacttctacccgggagccgtgacagtggcctggaaggcagatagcagccccgtcaaggcgggagtggagaccaccacaccctccaaacaaagcaacaacaagtacgcggccagcagctatctgagcctgacgcctgagcagtggaagtcccacagaagctacagctgccaggtcacgcatgaagggagcaccgtggagaagacagtggcccctacagaatgttcatagtaa

SEQ ID NO: 580 - protein, 220 aa, Artificial Sequence
  Humanized C8 Lambda light chain sequence
DIVMTQSPDSLAVSLGERATINCRASKSVSTSGYSYMHWYQQKPGQPPKLLIYLVSNLESGVPDRFSGSGSGTDFTLTISSLQAEDVAVYYCQHIRELTRSEFGGGTKVEIKRTGQPKAAPSVTLFPPSSEELQANKATLVCLISDFYPGAVTVAWKADSSPVKAGVETTTPSKQSNNKYAASSYLSLTPEQWKSHRSYSCQVTHEGSTVEKTVAPTECS

SEQ ID NO: 581 - DNA, 666 bp, Artificial Sequence
  Humanized C8 Kappa light chain sequence
gacatcgtgatgacccagtctccagactccctggctgtgtctctgggcgagagggccaccatcaactgcagggccagcaagagtgttagcaccagcggctacagctacatgcactggtaccagcagaaaccaggacagcctcctaagctgctcatttacctggtgtctaacctggaatccggggtccctgaccgattcagtggcagcgggtctgggacagatttcactctcaccatcagcagcctgcaggctgaagatgtggcagtttattactgtcaacacattcgggaactgaccaggagtgaattcggcggagggaccaaggtggagatcaaacgaactacggtggctgcaccatctgtcttcatcttcccgccatctgatgagcagttgaaatctggaactgcctctgttgtgtgcctgctgaataacttctatcccagagaggccaaagtacagtggaaggtggataacgccctccaatcgggtaactcccaggagagtgtcacagagcaggacagcaaggacagcacctacagcctcagcagcaccctgacgctgagcaaagcagactacgagaaacacaaagtctacgcctgcgaagtcacccatcagggcctgagctcgcccgtcacaaagagcttcaacaggggagagtgttagtaa

SEQ ID NO: 582 - protein, 220 aa, Artificial Sequence
  Humanized C8 Kappa light chain sequence
DIVMTQSPDSLAVSLGERATINCRASKSVSTSGYSYMHWYQQKPGQPPKLLIYLVSNLESGVPDRFSGSGSGTDFTLTISSLQAEDVAVYYCQHIRELTRSEFGGGTKVEIKRTTVAAPSVFIFPPSDEQLKSGTASVVCLLNNFYPREAKVQWKVDNALQSGNSQESVTEQDSKDSTYSLSSTLTLSKADYEKHKVYACEVTHQGLSSPVTKSFNRGEC

SEQ ID NO: 583 - skipped

SEQ ID NO: 584 - DNA, 942 bp, Artificial Sequence
  CART E6 CD8 sequence
gaggtccagctggttgagagtggcggtgggctggttaagcctggcggctccctgcggctgagctgcgccgcgagtggatttactttcagccgatatgggatgagttgggtgcggcaagctcccgggaagaggctggaatgggtctcaacaatctccggggggggcacttacatctattaccccgactcagtcaaggggagatttaccatttcacgagacaacgctaagaataccctgtatttgcagatgaattctctgagagcagaggacacagctgtttactattgtacccgcgacaactatggcaggaactacgactacggtatggactattggggacaagggacattggttacagtgagcagtggcggcgggggcagcggaggaggaggcagcggtggggggggcagcgagatagtgctcacgcagtcacccgcgactctcagtctctcacctggggaacgagctaccctgacgtgctctgctacctcctcagtgtcatatattcactggtatcagcaacggcccgggcagtcccctagattgctcatttatagtacctctaatctggcctcaggtatccctgcacgattttctggatctggttcaggttctgattacaccctcactatctctagcctggagcctgaagactttgccgtttattactgccagcagaggtctagctccccattcacctttgggagtgggaccaaggttgaaattaaaacgacaaccccggcccccagaccaccaacgccagcccccaccatcgccagccaacccctgtctctgagaccagaagcctgtaggcctgccgccggtggagctgtgcacacaagaggactggatttcgcctgtgatatctacatttgggccccgctcgcaggcacatgtggagtgctcctcctctccctggtgattaccctgtactgctgataa

SEQ ID NO: 585 - protein, 312 aa, Artificial Sequence
  CART E6 CD8 sequence
EVQLVESGGGLVKPGGSLRLSCAASGFTFSRYGMSWVRQAPGKRLEWVSTISGGGTYIYYPDSVKGRFTISRDNAKNTLYLQMNSLRAEDTAVYYCTRDNYGRNYDYGMDYWGQGTLVTVSSGGGGSGGGGSGGGGSEIVLTQSPATLSLSPGERATLTCSATSSVSYIHWYQQRPGQSPRLLIYSTSNLASGIPARFSGSGSGSDYTLTISSLEPEDFAVYYCQQRSSSPFTFGSGTKVEIKTTTPAPRPPTPAPTIASQPLSLRPEACRPAAGGAVHTRGLDFACDIYIWAPLAGTCGVLLLSLVITLYC

SEQ ID NO: 586 - DNA, 960 bp, Artificial Sequence
  CART C2 CD8 CD8 sequence - NCD8lshuMNC2scFvCD8ecd fragment CD8 transmembraneC
gaagtgcagctcgtagagagtggcgggggactggtgaagcccggtggaagcctcagactcagttgcgccgcctcaggtttcactttttcaggttacgccatgtcctgggtaagacaggcaccggggaaaggactcgagtgggtgtctactatcagctcaggaggcacttatatatattatcctgactctgtaaaaggccgatttacgatttctcgcgacaatgcaaagaactccctctacctccaaatgaacagtcttagggcagaagacactgctgtatactattgtgcacgcctcggcggcgacaactactacgagtactttgacgtgtgggggaaagggactaccgtgacagtttcaagcggaggaggtggctcaggtggaggcgggtcaggggggggaggaagtgatattgtgctcacacaatccccagcctccctggctgtgtctcccggccaacgcgctacaattacatgtcgggcctccaaaagcgtgagcaccagcggctacagctacatgcactggtatcaacagaaaccaggacaaccccccaaactgttgatttatctcgcttcaaacttggagtccggcgtgcctgcgcgcttttcagggagtgggagcggcacagattttacgctgactatcaaccccgtagaagcaaacgatacagcgaattattattgtcaacattcccgggaactcccctttacgttcggcgggggcacaaaggtcgaaattaagagaaccacgacaaccccggcccccagaccaccaacgccagcccccaccatcgccagccaacccctgtctctgagaccagaagcctgtaggcctgccgccggtggagctgtgcacacaagaggactggatttcgcctgtgatatctacatttgggccccgctcgcaggcacatgtggagtgctcctcctctccctggtgattaccctgtactgctgataa

SEQ ID NO: 587 - protein, 318 aa, Artificial Sequence
  CART C2 CD8 CD8 sequence - NCD8lshuMNC2scFvCD8ecd fragment CD8 transmembraneC
EVQLVESGGGLVKPGGSLRLSCAASGFTFSGYAMSWVRQAPGKGLEWVSTISSGGTYIYYPDSVKGRFTISRDNAKNSLYLQMNSLRAEDTAVYYCARLGGDNYYEYFDVWGKGTTVTVSSGGGGSGGGGSGGGGSDIVLTQSPASLAVSPGQRATITCRASKSVSTSGYSYMHWYQQKPGQPPKLLIYLASNLESGVPARFSGSGSGTDFTLTINPVEANDTANYYCQHSRELPFTFGGGTKVEIKRTTTTPAPRPPTPAPTIASQPLSLRPEACRPAAGGAVHTRGLDFACDIYIWAPLAGTCGVLLLSLVITLYC

SEQ ID NO: 588 - DNA, 339 bp, Artificial Sequence
  CD8/41BB sequence - N CD8 transmembrane 41BBC
acgacaaccccggcccccagaccaccaacgccagcccccaccatcgccagccaacccctgtctctgagaccagaagcctgtaggcctgccgccggtggagctgtgcacacaagaggactggatttcgcctgtgatatctacatttgggccccgctcgcaggcacatgtggagtgctcctcctctccctggtgattaccctgtactgcaaaaggggccgcaaaaaactcctttacatttttaagcagccttttatgaggccagtacagacgactcaagaggaagacgggtgctcatgccgctttcctgaggaggaggaaggagggtgcgaactgtgataa

SEQ ID NO: 589 - protein, 111 aa, Artificial Sequence
  CD8/41BB sequence - N CD8 transmembrane 41BBC
TTTPAPRPPTPAPTIASQPLSLRPEACRPAAGGAVHTRGLDFACDIYIWAPLAGTCGVLLLSLVITLYCKRGRKKLLYIFKQPFMRPVQTTQEEDGCSCRFPEEEEGGCEL

SEQ ID NO: 590 - DNA, 336 bp, Artificial Sequence
  CD8/CD28 sequence - N CD8 transmembrane CD28C
acgacaaccccggcccccagaccaccaacgccagcccccaccatcgccagccaacccctgtctctgagaccagaagcctgtaggcctgccgccggtggagctgtgcacacaagaggactggatttcgcctgtgatatctacatttgggccccgctcgcaggcacatgtggagtgctcctcctctccctggtgattaccctgtactgcagaagcaagcggtctcggctcctgcattctgattacatgaacatgaccccaagaagaccaggccccaccaggaaacattaccagccctacgctccgccacgcgacttcgctgcctaccggtcctgataa

SEQ ID NO: 591 - protein, 110 aa, Artificial Sequence
  CD8/CD28 sequence - N CD8 transmembrane CD28C
TTTPAPRPPTPAPTIASQPLSLRPEACRPAAGGAVHTRGLDFACDIYIWAPLAGTCGVLLLSLVITLYCRSKRSRLLHSDYMNMTPRRPGPTRKHYQPYAPPRDFAAYRS

SEQ ID NO: 592 - DNA, 549 bp, Artificial Sequence
  CD8/CD3z sequence - N CD8 transmembrane CD3zetaC
acgacaaccccggcccccagaccaccaacgccagcccccaccatcgccagccaacccctgtctctgagaccagaagcctgtaggcctgccgccggtggagctgtgcacacaagaggactggatttcgcctgtgatatctacatttgggccccgctcgcaggcacatgtggagtgctcctcctctccctggtgattaccctgtactgccgcgttaagttctcccgatcagccgacgcgcctgcttacaagcagggccagaaccaactgtacaacgagctgaatctcggtagacgggaagagtacgacgtgttggacaaacggagaggccgcgacccagaaatgggcggcaagcctcgcaggaaaaacccccaggagggactgtacaatgagttgcagaaagataagatggcagaagcttatagcgagatcggaatgaagggggaaaggagacgagggaaaggacacgacggcctttatcagggcctgtccacagcaacaaaagatacgtatgacgccctccatatgcaggcacttccaccacggtgataa

SEQ ID NO: 593 - protein, 181 aa, Artificial Sequence
  CD8/CD3z sequence - N CD8 transmembrane CD3zetaC
TTTPAPRPPTPAPTIASQPLSLRPEACRPAAGGAVHTRGLDFACDIYIWAPLAGTCGVLLLSLVITLYCRVKFSRSADAPAYKQGQNQLYNELNLGRREEYDVLDKRRGRDPEMGGKPRRKNPQEGLYNELQKDKMAEAYSEIGMKGERRRGKGHDGLYQGLSTATKDTYDALHMQALPPR

SEQ ID NO: 594 - DNA, 672 bp, Artificial Sequence
  CD8/CD28/CD3z sequence - N CD8 transmembrane CD28 CD3zetaC
acgacaaccccggcccccagaccaccaacgccagcccccaccatcgccagccaacccctgtctctgagaccagaagcctgtaggcctgccgccggtggagctgtgcacacaagaggactggatttcgcctgtgatatctacatttgggccccgctcgcaggcacatgtggagtgctcctcctctccctggtgattaccctgtactgcagaagcaagcggtctcggctcctgcattctgattacatgaacatgaccccaagaagaccaggccccaccaggaaacattaccagccctacgctccgccacgcgacttcgctgcctaccggtcccgcgttaagttctcccgatcagccgacgcgcctgcttacaagcagggccagaaccaactgtacaacgagctgaatctcggtagacgggaagagtacgacgtgttggacaaacggagaggccgcgacccagaaatgggcggcaagcctcgcaggaaaaacccccaggagggactgtacaatgagttgcagaaagataagatggcagaagcttatagcgagatcggaatgaagggggaaaggagacgagggaaaggacacgacggcctttatcagggcctgtccacagcaacaaaagatacgtatgacgccctccatatgcaggcacttccaccacggtgataa

SEQ ID NO: 595 - protein, 222 aa, Artificial Sequence
  CD8/CD28/CD3z sequence - N CD8 transmembrane CD28 CD3zetaC
TTTPAPRPPTPAPTIASQPLSLRPEACRPAAGGAVHTRGLDFACDIYIWAPLAGTCGVLLLSLVITLYCRSKRSRLLHSDYMNMTPRRPGPTRKHYQPYAPPRDFAAYRSRVKFSRSADAPAYKQGQNQLYNELNLGRREEYDVLDKRRGRDPEMGGKPRRKNPQEGLYNELQKDKMAEAYSEIGMKGERRRGKGHDGLYQGLSTATKDTYDALHMQALPPR

SEQ ID NO: 596 - DNA, 675 bp, Artificial Sequence
  CD8/41BB/CD3z sequence - N CD8 transmembrane 41BB CD3zetaC
acgacaaccccggcccccagaccaccaacgccagcccccaccatcgccagccaacccctgtctctgagaccagaagcctgtaggcctgccgccggtggagctgtgcacacaagaggactggatttcgcctgtgatatctacatttgggccccgctcgcaggcacatgtggagtgctcctcctctccctggtgattaccctgtactgcaaaaggggccgcaaaaaactcctttacatttttaagcagccttttatgaggccagtacagacgactcaagaggaagacgggtgctcatgccgctttcctgaggaggaggaaggagggtgcgaactgcgcgttaagttctcccgatcagccgacgcgcctgcttacaagcagggccagaaccaactgtacaacgagctgaatctcggtagacgggaagagtacgacgtgttggacaaacggagaggccgcgacccagaaatgggcggcaagcctcgcaggaaaaacccccaggagggactgtacaatgagttgcagaaagataagatggcagaagcttatagcgagatcggaatgaagggggaaaggagacgagggaaaggacacgacggcctttatcagggcctgtccacagcaacaaaagatacgtatgacgccctccatatgcaggcacttccaccacggtgataa

SEQ ID NO: 597 - protein, 223 aa, Artificial Sequence
  CD8/41BB/CD3z sequence - N CD8 transmembrane 41BB CD3zetaC
TTTPAPRPPTPAPTIASQPLSLRPEACRPAAGGAVHTRGLDFACDIYIWAPLAGTCGVLLLSLVITLYCKRGRKKLLYIFKQPFMRPVQTTQEEDGCSCRFPEEEEGGCELRVKFSRSADAPAYKQGQNQLYNELNLGRREEYDVLDKRRGRDPEMGGKPRRKNPQEGLYNELQKDKMAEAYSEIGMKGERRRGKGHDGLYQGLSTATKDTYDALHMQALPPR

SEQ ID NO: 598 - DNA, 798 bp, Artificial Sequence
  CD8/CD28/41BB/CD3z sequence - N CD8 transmembrane CD28 41BB CD3zetaC
acgacaaccccggcccccagaccaccaacgccagcccccaccatcgccagccaacccctgtctctgagaccagaagcctgtaggcctgccgccggtggagctgtgcacacaagaggactggatttcgcctgtgatatctacatttgggccccgctcgcaggcacatgtggagtgctcctcctctccctggtgattaccctgtactgcagaagcaagcggtctcggctcctgcattctgattacatgaacatgaccccaagaagaccaggccccaccaggaaacattaccagccctacgctccgccacgcgacttcgctgcctaccggtccaaaaggggccgcaaaaaactcctttacatttttaagcagccttttatgaggccagtacagacgactcaagaggaagacgggtgctcatgccgctttcctgaggaggaggaaggagggtgcgaactgcgcgttaagttctcccgatcagccgacgcgcctgcttacaagcagggccagaaccaactgtacaacgagctgaatctcggtagacgggaagagtacgacgtgttggacaaacggagaggccgcgacccagaaatgggcggcaagcctcgcaggaaaaacccccaggagggactgtacaatgagttgcagaaagataagatggcagaagcttatagcgagatcggaatgaagggggaaaggagacgagggaaaggacacgacggcctttatcagggcctgtccacagcaacaaaagatacgtatgacgccctccatatgcaggcacttccaccacggtgataa

SEQ ID NO: 599 - protein, 264 aa, Artificial Sequence
  CD8/CD28/41BB/CD3z sequence - N CD8 transmembrane CD28 41BB CD3zetaC
TTTPAPRPPTPAPTIASQPLSLRPEACRPAAGGAVHTRGLDFACDIYIWAPLAGTCGVLLLSLVITLYCRSKRSRLLHSDYMNMTPRRPGPTRKHYQPYAPPRDFAAYRSKRGRKKLLYIFKQPFMRPVQTTQEEDGCSCRFPEEEEGGCELRVKFSRSADAPAYKQGQNQLYNELNLGRREEYDVLDKRRGRDPEMGGKPRRKNPQEGLYNELQKDKMAEAYSEIGMKGERRRGKGHDGLYQGLSTATKDTYDALHMQALPPR

SEQ ID NO: 600-607 - skipped (8 entries)

SEQ ID NO: 608 - DNA, 1482 bp, Artificial Sequence
  CART C2 CD8/CD8/CD28/CD3z sequence - NCD8lshuMNC2scFvCD8ecd fragment CD8 transmembrane CD28 CD3zetaC
atggccttgccagtgacggccctgctgctgccattggctcttctgttgcacgctgccaggcctgaagtgcagctcgtagagagtggcgggggactggtgaagcccggtggaagcctcagactcagttgcgccgcctcaggtttcactttttcaggttacgccatgtcctgggtaagacaggcaccggggaaaggactcgagtgggtgtctactatcagctcaggaggcacttatatatattatcctgactctgtaaaaggccgatttacgatttctcgcgacaatgcaaagaactccctctacctccaaatgaacagtcttagggcagaagacactgctgtatactattgtgcacgcctcggcggcgacaactactacgagtactttgacgtgtgggggaaagggactaccgtgacagtttcaagcggaggaggtggctcaggtggaggcgggtcaggggggggaggaagtgatattgtgctcacacaatccccagcctccctggctgtgtctcccggccaacgcgctacaattacatgtcgggcctccaaaagcgtgagcaccagcggctacagctacatgcactggtatcaacagaaaccaggacaaccccccaaactgttgatttatctcgcttcaaacttggagtccggcgtgcctgcgcgcttttcagggagtgggagcggcacagattttacgctgactatcaaccccgtagaagcaaacgatacagcgaattattattgtcaacattcccgggaactcccctttacgttcggcgggggcacaaaggtcgaaattaagagaaccacgacaaccccggcccccagaccaccaacgccagcccccaccatcgccagccaacccctgtctctgagaccagaagcctgtaggcctgccgccggtggagctgtgcacacaagaggactggatttcgcctgtgatatctacatttgggccccgctcgcaggcacatgtggagtgctcctcctctccctggtgattaccctgtactgcagaagcaagcggtctcggctcctgcattctgattacatgaacatgaccccaagaagaccaggccccaccaggaaacattaccagccctacgctccgccacgcgacttcgctgcctaccggtcccgcgttaagttctcccgatcagccgacgcgcctgcttacaagcagggccagaaccaactgtacaacgagctgaatctcggtagacgggaagagtacgacgtgttggacaaacggagaggccgcgacccagaaatgggcggcaagcctcgcaggaaaaacccccaggagggactgtacaatgagttgcagaaagataagatggcagaagcttatagcgagatcggaatgaagggggaaaggagacgagggaaaggacacgacggcctttatcagggcctgtccacagcaacaaaagatacgtatgacgccctccatatgcaggcacttccaccacggtgataa

SEQ ID NO: 609 - protein, 492 aa, Artificial Sequence
  CART C2 CD8/CD8/CD28/CD3z sequence - NCD8lshuMNC2scFvCD8ecd fragment CD8 transmembrane CD28 CD3zetaC
MALPVTALLLPLALLLHAARPEVQLVESGGGLVKPGGSLRLSCAASGFTFSGYAMSWVRQAPGKGLEWVSTISSGGTYIYYPDSVKGRFTISRDNAKNSLYLQMNSLRAEDTAVYYCARLGGDNYYEYFDVWGKGTTVTVSSGGGGSGGGGSGGGGSDIVLTQSPASLAVSPGQRATITCRASKSVSTSGYSYMHWYQQKPGQPPKLLIYLASNLESGVPARFSGSGSGTDFTLTINPVEANDTANYYCQHSRELPFTFGGGTKVEIKRTTTTPAPRPPTPAPTIASQPLSLRPEACRPAAGGAVHTRGLDFACDIYIWAPLAGTCGVLLLSLVITLYCRSKRSRLLHSDYMNMTPRRPGPTRKHYQPYAPPRDFAAYRSRVKFSRSADAPAYKQGQNQLYNELNLGRREEYDVLDKRRGRDPEMGGKPRRKNPQEGLYNELQKDKMAEAYSEIGMKGERRRGKGHDGLYQGLSTATKDTYDALHMQALPPR

SEQ ID NO: 610 - DNA, 1485 bp, Artificial Sequence
  CART C2 CD8/CD8/41BB/CD3z sequence #13 - NCD8lshuMNC2scFvCD8ecd fragment CD8 transmembrane 41BB CD3zetaC
atggccttgccagtgacggccctgctgctgccattggctcttctgttgcacgctgccaggcctgaagtgcagctcgtagagagtggcgggggactggtgaagcccggtggaagcctcagactcagttgcgccgcctcaggtttcactttttcaggttacgccatgtcctgggtaagacaggcaccggggaaaggactcgagtgggtgtctactatcagctcaggaggcacttatatatattatcctgactctgtaaaaggccgatttacgatttctcgcgacaatgcaaagaactccctctacctccaaatgaacagtcttagggcagaagacactgctgtatactattgtgcacgcctcggcggcgacaactactacgagtactttgacgtgtgggggaaagggactaccgtgacagtttcaagcggaggaggtggctcaggtggaggcgggtcaggggggggaggaagtgatattgtgctcacacaatccccagcctccctggctgtgtctcccggccaacgcgctacaattacatgtcgggcctccaaaagcgtgagcaccagcggctacagctacatgcactggtatcaacagaaaccaggacaaccccccaaactgttgatttatctcgcttcaaacttggagtccggcgtgcctgcgcgcttttcagggagtgggagcggcacagattttacgctgactatcaaccccgtagaagcaaacgatacagcgaattattattgtcaacattcccgggaactcccctttacgttcggcgggggcacaaaggtcgaaattaagagaaccacgacaaccccggcccccagaccaccaacgccagcccccaccatcgccagccaacccctgtctctgagaccagaagcctgtaggcctgccgccggtggagctgtgcacacaagaggactggatttcgcctgtgatatctacatttgggccccgctcgcaggcacatgtggagtgctcctcctctccctggtgattaccctgtactgcaaaaggggccgcaaaaaactcctttacatttttaagcagccttttatgaggccagtacagacgactcaagaggaagacgggtgctcatgccgctttcctgaggaggaggaaggagggtgcgaactgcgcgttaagttctcccgatcagccgacgcgcctgcttacaagcagggccagaaccaactgtacaacgagctgaatctcggtagacgggaagagtacgacgtgttggacaaacggagaggccgcgacccagaaatgggcggcaagcctcgcaggaaaaacccccaggagggactgtacaatgagttgcagaaagataagatggcagaagcttatagcgagatcggaatgaagggggaaaggagacgagggaaaggacacgacggcctttatcagggcctgtccacagcaacaaaagatacgtatgacgccctccatatgcaggcacttccaccacggtgataa

SEQ ID NO: 611 - protein, 493 aa, Artificial Sequence
  CART C2 CD8/CD8/41BB/CD3z sequence #13 - NCD8lshuMNC2scFvCD8ecd fragment CD8 transmembrane 41BB CD3zetaC
MALPVTALLLPLALLLHAARPEVQLVESGGGLVKPGGSLRLSCAASGFTFSGYAMSWVRQAPGKGLEWVSTISSGGTYIYYPDSVKGRFTISRDNAKNSLYLQMNSLRAEDTAVYYCARLGGDNYYEYFDVWGKGTTVTVSSGGGGSGGGGSGGGGSDIVLTQSPASLAVSPGQRATITCRASKSVSTSGYSYMHWYQQKPGQPPKLLIYLASNLESGVPARFSGSGSGTDFTLTINPVEANDTANYYCQHSRELPFTFGGGTKVEIKRTTTTPAPRPPTPAPTIASQPLSLRPEACRPAAGGAVHTRGLDFACDIYIWAPLAGTCGVLLLSLVITLYCKRGRKKLLYIFKQPFMRPVQTTQEEDGCSCRFPEEEEGGCELRVKFSRSADAPAYKQGQNQLYNELNLGRREEYDVLDKRRGRDPEMGGKPRRKNPQEGLYNELQKDKMAEAYSEIGMKGERRRGKGHDGLYQGLSTATKDTYDALHMQALPPR

SEQ ID NO: 612-619 - skipped (8 entries)

SEQ ID NO: 620 - protein, 43 aa, Artificial Sequence
  MUC1 truncated extra cellular domain sequence
SNIKFRPGSVVVQLTLAFREGTINVHDVETQFNQYKTEAASRY

SEQ ID NO: 621 - protein, 35 aa, Artificial Sequence
  MUC1 truncated extra cellular domain sequence
SVVVQLTLAFREGTINVHDVETQFNQYKTEAASRY

SEQ ID NO: 622 - protein, 24 aa, Artificial Sequence
  MUC1 truncated extra cellular domain sequence
VQLTLAFREGTINVHDVETQFNQY

SEQ ID NO: 623 - protein, 24 aa, Artificial Sequence
  MUC1 truncated extra cellular domain sequence
SNIKFRPGSVVVQLTLAFREGTIN

SEQ ID NO: 624 - DNA, 28 bp, Artificial Sequence
  Primer
attctaagcttgggccaccatggaactg

SEQ ID NO: 625 - DNA, 41 bp, Artificial Sequence
  Primer
tctagagtttaaacttactatttacccggagacagggagag

SEQ ID NO: 626 - DNA, 41 bp, Artificial Sequence
  Primer
agtatggcccagccggccgaggtgcagctggtggagtctgg

SEQ ID NO: 627 - DNA, 26 bp, Artificial Sequence
  Primer
tagaaggcacagtcgaggctgatcag

SEQ ID NO: 628 - DNA, 27 bp, Artificial Sequence
  Primer
attctaagcttgggccaccatggaagc

SEQ ID NO: 629 - DNA, 40 bp, Artificial Sequence
  Primer
tctagagtttaaacttactaacactctcccctgttgaagc

SEQ ID NO: 630 - DNA, 43 bp, Artificial Sequence
  Primer
agtatggcccagccggccgaaattgtgttgacacagtctccag

SEQ ID NO: 631 - DNA, 26 bp, Artificial Sequence
  Primer
tagaaggcacagtcgaggctgatcag

SEQ ID NO: 632 - DNA, 33 bp, Artificial Sequence
  Primer
actgtcatatggaggtgcagctggtggagtctg

SEQ ID NO: 633 - DNA, 37 bp, Artificial Sequence
  Primer
actgtctcgagtttaatttccactttggtgccgctgc

SEQ ID NO: 634 - DNA, 33 bp, Artificial Sequence; identical to SEQ ID NO: 632
  Primer

SEQ ID NO: 635 - DNA, 37 bp, Artificial Sequence
  Primer
actgtaccggttttaatttccactttggtgccgctgc

SEQ ID NO: 636 - DNA, 29 bp, Artificial Sequence
  Primer
cttcttcctcaggagcaagctcaccgtgg

SEQ ID NO: 637 - DNA, 18 bp, Artificial Sequence
  Primer
gagccgtcggagtccagc

SEQ ID NO: 638 - DNA, 18 bp, Artificial Sequence
  Primer
gcacctgaactcctgggg

SEQ ID NO: 639 - DNA, 22 bp, Artificial Sequence
  Primer
tttaatttccactttggtgccg

SEQ ID NO: 640 - DNA, 32 bp, Artificial Sequence
  Primer
cgcggctagcttaagcttggtaccgagggcca

SEQ ID NO: 641 - DNA, 36 bp, Artificial Sequence
  Primer
cgcggcggccgcctgatcagcgggtttaaacttatc

SEQ ID NO: 642 - DNA, 2151 bp, Artificial Sequence
  MMP9 sequence
atgagcctctggcagcccctggtcctggtgctcctggtgctgggctgctgctttgctgcccccagacagcgccagtccacccttgtgctcttccctggagacctgagaaccaatctcaccgacaggcagctggcagaggaatacctgtaccgctatggttacactcgggtggcagagatgcgtggagagtcgaaatctctggggcctgcgctgctgcttctccagaagcaactgtccctgcccgagaccggtgagctggatagcgccacgctgaaggccatgcgaaccccacggtgcggggtcccagacctgggcagattccaaacctttgagggcgacctcaagtggcaccaccacaacatcacctattggatccaaaactactcggaagacttgccgcgggcggtgattgacgacgcctttgcccgcgccttcgcactgtggagcgcggtgacgccgctcaccttcactcgcgtgtacagccgggacgcagacatcgtcatccagtttggtgtcgcggagcacggagacgggtatcccttcgacgggaaggacgggctcctggcacacgcctttcctcctggccccggcattcagggagacgcccatttcgacgatgacgagttgtggtccctgggcaagggcgtcgtggttccaactcggtttggaaacgcagatggcgcggcctgccacttccccttcatcttcgagggccgctcctactctgcctgcaccaccgacggtcgctccgacggcttgccctggtgcagtaccacggccaactacgacaccgacgaccggtttggcttctgccccagcgagagactctacacccaggacggcaatgctgatgggaaaccctgccagtttccattcatcttccaaggccaatcctactccgcctgcaccacggacggtcgctccgacggctaccgctggtgcgccaccaccgccaactacgaccgggacaagctcttcggcttctgcccgacccgagctgactcgacggtgatggggggcaactcggcgggggagctgtgcgtcttccccttcactttcctgggtaaggagtactcgacctgtaccagcgagggccgcggagatgggcgcctctggtgcgctaccacctcgaactttgacagcgacaagaagtggggcttctgcccggaccaaggatacagtttgttcctcgtggcggcgcatgagttcggccacgcgctgggcttagatcattcctcagtgccggaggcgctcatgtaccctatgtaccgcttcactgaggggccccccttgcataaggacgacgtgaatggcatccggcacctctatggtcctcgccctgaacctgagccacggcctccaaccaccaccacaccgcagcccacggctcccccgacggtctgccccaccggaccccccactgtccacccctcagagcgccccacagctggccccacaggtcccccctcagctggccccacaggtccccccactgctggcccttctacggccactactgtgcctttgagtccggtggacgatgcctgcaacgtgaacatcttcgacgccatcgcggagattgggaaccagctgtatttgttcaaggatgggaagtactggcgattctctgagggcagggggagccggccgcagggccccttccttatcgccgacaagtggcccgcgctgccccgcaagctggactcggtctttgaggagcggctctccaagaagcttttcttcttctctgggcgccaggtgtgggtgtacacaggcgcgtcggtgctgggcccgaggcgtctggacaagctgggcctgggagccgacgtggcccaggtgaccggggccctccggagtggcagggggaagatgctgctgttcagcgggcggcgcctctggaggttcgacgtgaaggcgcagatggtggatccccggagcgccagcgaggtggaccggatgttccccggggtgcctttggacacgcacgacgtcttccagtaccgagagaaagcctatttctgccaggaccgcttctactggcgcgtgagttcccggagtgagttgaaccaggtggaccaagtgggctacgtgacctatgacatcctgcagtgccctgaggacgattacaaggatgacgacgataagtgataa

SEQ ID NO: 643 - protein, 715 aa, Artificial Sequence
  MMP9 sequence
MSLWQPLVLVLLVLGCCFAAPRQRQSTLVLFPGDLRTNLTDRQLAEEYLYRYGYTRVAEMRGESKSLGPALLLLQKQLSLPETGELDSATLKAMRTPRCGVPDLGRFQTFEGDLKWHHHNITYWIQNYSEDLPRAVIDDAFARAFALWSAVTPLTFTRVYSRDADIVIQFGVAEHGDGYPFDGKDGLLAHAFPPGPGIQGDAHFDDDELWSLGKGVVVPTRFGNADGAACHFPFIFEGRSYSACTTDGRSDGLPWCSTTANYDTDDRFGFCPSERLYTQDGNADGKPCQFPFIFQGQSYSACTTDGRSDGYRWCATTANYDRDKLFGFCPTRADSTVMGGNSAGELCVFPFTFLGKEYSTCTSEGRGDGRLWCATTSNFDSDKKWGFCPDQGYSLFLVAAHEFGHALGLDHSSVPEALMYPMYRFTEGPPLHKDDVNGIRHLYGPRPEPEPRPPTTTTPQPTAPPTVCPTGPPTVHPSERPTAGPTGPPSAGPTGPPTAGPSTATTVPLSPVDDACNVNIFDAIAEIGNQLYLFKDGKYWRFSEGRGSRPQGPFLIADKWPALPRKLDSVFEERLSKKLFFFSGRQVWVYTGASVLGPRRLDKLGLGADVAQVTGALRSGRGKMLLFSGRRLWRFDVKAQMVDPRSASEVDRMFPGVPLDTHDVFQYREKAYFCQDRFYWRVSSRSELNQVDQVGYVTYDILQCPEDDYKDDDDK

SEQ ID NO: 644 - DNA, 1062 bp, Artificial Sequence
  MMP9 catalytic domain
atgttccaaacctttgagggcgacctcaagtggcaccaccacaacatcacctattggatccaaaactactcggaagacttgccgcgggcggtgattgacgacgcctttgcccgcgccttcgcactgtggagcgcggtgacgccgctcaccttcactcgcgtgtacagccgggacgcagacatcgtcatccagtttggtgtcgcggagcacggagacgggtatcccttcgacgggaaggacgggctcctggcacacgcctttcctcctggccccggcattcagggagacgcccatttcgacgatgacgagttgtggtccctgggcaagggcgtcgtggttccaactcggtttggaaacgcagatggcgcggcctgccacttccccttcatcttcgagggccgctcctactctgcctgcaccaccgacggtcgctccgacggcttgccctggtgcagtaccacggccaactacgacaccgacgaccggtttggcttctgccccagcgagagactctacacccaggacggcaatgctgatgggaaaccctgccagtttccattcatcttccaaggccaatcctactccgcctgcaccacggacggtcgctccgacggctaccgctggtgcgccaccaccgccaactacgaccgggacaagctcttcggcttctgcccgacccgagctgactcgacggtgatggggggcaactcggcgggggagctgtgcgtcttccccttcactttcctgggtaaggagtactcgacctgtaccagcgagggccgcggagatgggcgcctctggtgcgctaccacctcgaactttgacagcgacaagaagtggggcttctgcccggaccaaggatacagtttgttcctcgtggcggcgcatgagttcggccacgcgctgggcttagatcattcctcagtgccggaggcgctcatgtaccctatgtaccgcttcactgaggggccccccttgcataaggacgacgtgaatggcatccggcacctctatggtcctcgccctgaacctgattacaaggatgacgacgataagtgataa

SEQ ID NO: 645 - protein, 352 aa, Artificial Sequence
  MMP9 catalytic domain
MFQTFEGDLKWHHHNITYWIQNYSEDLPRAVIDDAFARAFALWSAVTPLTFTRVYSRDADIVIQFGVAEHGDGYPFDGKDGLLAHAFPPGPGIQGDAHFDDDELWSLGKGVVVPTRFGNADGAACHFPFIFEGRSYSACTTDGRSDGLPWCSTTANYDTDDRFGFCPSERLYTQDGNADGKPCQFPFIFQGQSYSACTTDGRSDGYRWCATTANYDRDKLFGFCPTRADSTVMGGNSAGELCVFPFTFLGKEYSTCTSEGRGDGRLWCATTSNFDSDKKWGFCPDQGYSLFLVAAHEFGHALGLDHSSVPEALMYPMYRFTEGPPLHKDDVNGIRHLYGPRPEPDYKDDDDK

SEQ ID NO: 646 - DNA, 2186 bp, Artificial Sequence
  NFATc1 Promoter (NFATc1P)
aggcaggaggaagaggaaaggggcgcagggcgctcggggagcagagccgggggcccgcggtggccgcagaggccgggccggggcgcagaggccgggcgagctggccgcgctctgggccgccgcctccggaactccctgcgcctggcgcgcggccaccgtggtcccggcaacggcattaaacagagggaaacagacccgggattccgtcacccgggcggggggataaggacggctttgagagcagacaggaaaagggagcttttctgcatggggtgaaaaaattatttattgaaggaggaggaggcggcagcggaggaaggggaggggcgggaggaggaggaagagccggccgcccccgccccggccccggctcctcaggagccaagggcagcctcgccaggtcggtcccgggctcgaggaccgcggctggggtcgaggggctcagtctcccacgtgaccggctgggcgcgccccgccagacccggcctcgggattccctcctcccggcgagtctccgcccgccccgtcctggaggtggggagaaggagggcggggcgggggggacggaaactctccccgccaaatcctggccccaggcctggggacactcgcggcgggaagatttggaggggaggggagggggaggggcgtgggggcgcggcctcgctggagtccccctgaccccccgacccccgcccaccggcctgggcgtcctcccgcggcccctcctcccctcccggcgcccggtgctctggggcgcgtgccacgcctggctcggcgccgtaggggcccccgcaggtagagacccctggaaatggcctcgacgccgcaggagcgaggcggccaccaccccgctaatccgggcacgtctctccaggccgaggcctgcggtggaaaagccggggttccatttgtgctgagtcggggcggccgaatggagccaggcctcgggacgcgggacggacgggctctggccgcgcaccttcgcgggctctgcagcgcccgaccgcctcccccggcagggaggaggcgcttgtggggggcacccacggggcacagtgatccctgggggtctgcggacctcctgggccccgcagcagacacgagtttagcctttgggtttagtttaaatcacataagggtgtcgtgcaatcgatttatggtttctacacaccagacactttaacctccaaccccccccatccaagccaacaagaaaatgcggtgccgtgttggcagctgagctgcgcccgaagagacgcagggagacgtaagagaggaaagtgtgagtggccggggggcctccccccgtcagaagtcgcgcagtcgcgcccataaaacgccccctccgggcggctagggcaggtgagcgcgtccccgggcctccccacgccggcccctgccacagagccgtctaggtcgagcagatatttacagaataaaaatgacaataactcgacgtcccgggacggccacgcaatctgttagtaatttagcgggatgggaatttcctttctagggcctgccagtgaagcgcttttccaaatttccacagcgggggaagcctgcgattttacataatgacttcagcatgccgggctttctcgacacccctccccggcccccggcccccgccccccgccccttttccagcagggccgggctccctccggacacccgcgtggactcaggcgtcccgtctggcccgttcgcccccgtttcccccgccagccccagcgcccccctgcccggcccccggattccccgttcccgcccctacgcccccatcccctccccgtgcgcccctccccgtgcgcccccctccccgtgcgccccccctccccgtgcgcccccctccccgtgcgccccccctccccgggcgcccccctccccgggcgccccccctccccgtgcgcccccccctccccgtgcgccccccctccccgtgcgcgccccgcctcttgcgcccctgcccccaggcgagcggctgccgcggcgcggggaggggcgggcgctcggcgactcgtccccggggccccgcgcgggcccgggcagcaggggcgtgatgtcacggcagggagggggcgcgggagccgccgggccggcggggaggcgggggaggtgttttccagctttaaaaaggcaggaggcagagcgcggccctgcgtcagagcgagactcagagg

SEQ ID NO: 647 - DNA, 4349 bp, Artificial Sequence
  NFATc1PMMP9
aggcaggaggaagaggaaaggggcgcagggcgctcggggagcagagccgggggcccgcggtggccgcagaggccgggccggggcgcagaggccgggcgagctggccgcgctctgggccgccgcctccggaactccctgcgcctggcgcgcggccaccgtggtcccggcaacggcattaaacagagggaaacagacccgggattccgtcacccgggcggggggataaggacggctttgagagcagacaggaaaagggagcttttctgcatggggtgaaaaaattatttattgaaggaggaggaggcggcagcggaggaaggggaggggcgggaggaggaggaagagccggccgcccccgccccggccccggctcctcaggagccaagggcagcctcgccaggtcggtcccgggctcgaggaccgcggctggggtcgaggggctcagtctcccacgtgaccggctgggcgcgccccgccagacccggcctcgggattccctcctcccggcgagtctccgcccgccccgtcctggaggtggggagaaggagggcggggcgggggggacggaaactctccccgccaaatcctggccccaggcctggggacactcgcggcgggaagatttggaggggaggggagggggaggggcgtgggggcgcggcctcgctggagtccccctgaccccccgacccccgcccaccggcctgggcgtcctcccgcggcccctcctcccctcccggcgcccggtgctctggggcgcgtgccacgcctggctcggcgccgtaggggcccccgcaggtagagacccctggaaatggcctcgacgccgcaggagcgaggcggccaccaccccgctaatccgggcacgtctctccaggccgaggcctgcggtggaaaagccggggttccatttgtgctgagtcggggcggccgaatggagccaggcctcgggacgcgggacggacgggctctggccgcgcaccttcgcgggctctgcagcgcccgaccgcctcccccggcagggaggaggcgcttgtggggggcacccacggggcacagtgatccctgggggtctgcggacctcctgggccccgcagcagacacgagtttagcctttgggtttagtttaaatcacataagggtgtcgtgcaatcgatttatggtttctacacaccagacactttaacctccaaccccccccatccaagccaacaagaaaatgcggtgccgtgttggcagctgagctgcgcccgaagagacgcagggagacgtaagagaggaaagtgtgagtggccggggggcctccccccgtcagaagtcgcgcagtcgcgcccataaaacgccccctccgggcggctagggcaggtgagcgcgtccccgggcctccccacgccggcccctgccacagagccgtctaggtcgagcagatatttacagaataaaaatgacaataactcgacgtcccgggacggccacgcaatctgttagtaatttagcgggatgggaatttcctttctagggcctgccagtgaagcgcttttccaaatttccacagcgggggaagcctgcgattttacataatgacttcagcatgccgggctttctcgacacccctccccggcccccggcccccgccccccgccccttttccagcagggccgggctccctccggacacccgcgtggactcaggcgtcccgtctggcccgttcgcccccgtttcccccgccagccccagcgcccccctgcccggcccccggattccccgttcccgcccctacgcccccatcccctccccgtgcgcccctccccgtgcgcccccctccccgtgcgccccccctccccgtgcgcccccctccccgtgcgccccccctccccgggcgcccccctccccgggcgccccccctccccgtgcgcccccccctccccgtgcgccccccctccccgtgcgcgccccgcctcttgcgcccctgcccccaggcgagcggctgccgcggcgcggggaggggcgggcgctcggcgactcgtccccggggccccgcgcgggcccgggcagcaggggcgtgatgtcacggcagggagggggcgcgggagccgccgggccggcggggaggcgggggaggtgttttccagctttaaaaaggcaggaggcagagcgcggccctgcgtcagagcgagactcagaggtctagagccaccatgagcctctggcagcccctggtcctggtgctcctggtgctgggctgctgctttgctgcccccagacagcgccagtccacccttgtgctcttccctggagacctgagaaccaatctcaccgacaggcagctggcagaggaatacctgtaccgctatggttacactcgggtggcagagatgcgtggagagtcgaaatctctggggcctgcgctgctgcttctccagaagcaactgtccctgcccgagaccggtgagctggatagcgccacgctgaaggccatgcgaaccccacggtgcggggtcccagacctgggcagattccaaacctttgagggcgacctcaagtggcaccaccacaacatcacctattggatccaaaactactcggaagacttgccgcgggcggtgattgacgacgcctttgcccgcgccttcgcactgtggagcgcggtgacgccgctcaccttcactcgcgtgtacagccgggacgcagacatcgtcatccagtttggtgtcgcggagcacggagacgggtatcccttcgacgggaaggacgggctcctggcacacgcctttcctcctggccccggcattcagggagacgcccatttcgacgatgacgagttgtggtccctgggcaagggcgtcgtggttccaactcggtttggaaacgcagatggcgcggcctgccacttccccttcatcttcgagggccgctcctactctgcctgcaccaccgacggtcgctccgacggcttgccctggtgcagtaccacggccaactacgacaccgacgaccggtttggcttctgccccagcgagagactctacacccaggacggcaatgctgatgggaaaccctgccagtttccattcatcttccaaggccaatcctactccgcctgcaccacggacggtcgctccgacggctaccgctggtgcgccaccaccgccaactacgaccgggacaagctcttcggcttctgcccgacccgagctgactcgacggtgatggggggcaactcggcgggggagctgtgcgtcttccccttcactttcctgggtaaggagtactcgacctgtaccagcgagggccgcggagatgggcgcctctggtgcgctaccacctcgaactttgacagcgacaagaagtggggcttctgcccggaccaaggatacagtttgttcctcgtggcggcgcatgagttcggccacgcgctgggcttagatcattcctcagtgccggaggcgctcatgtaccctatgtaccgcttcactgaggggccccccttgcataaggacgacgtgaatggcatccggcacctctatggtcctcgccctgaacctgagccacggcctccaaccaccaccacaccgcagcccacggctcccccgacggtctgccccaccggaccccccactgtccacccctcagagcgccccacagctggccccacaggtcccccctcagctggccccacaggtccccccactgctggcccttctacggccactactgtgcctttgagtccggtggacgatgcctgcaacgtgaacatcttcgacgccatcgcggagattgggaaccagctgtatttgttcaaggatgggaagtactggcgattctctgagggcagggggagccggccgcagggccccttccttatcgccgacaagtggcccgcgctgccccgcaagctggactcggtctttgaggagcggctctccaagaagcttttcttcttctctgggcgccaggtgtgggtgtacacaggcgcgtcggtgctgggcccgaggcgtctggacaagctgggcctgggagccgacgtggcccaggtgaccggggccctccggagtggcagggggaagatgctgctgttcagcgggcggcgcctctggaggttcgacgtgaaggcgcagatggtggatccccggagcgccagcgaggtggaccggatgttccccggggtgcctttggacacgcacgacgtcttccagtaccgagagaaagcctatttctgccaggaccgcttctactggcgcgtgagttcccggagtgagttgaaccaggtggaccaagtgggctacgtgacctatgacatcctgcagtgccctgaggacgattacaaggatgacgacgataagtgataa

SEQ ID NO: 648 - DNA, 3260 bp, Artificial Sequence
  NFATc1PMMP9cat
aggcaggaggaagaggaaaggggcgcagggcgctcggggagcagagccgggggcccgcggtggccgcagaggccgggccggggcgcagaggccgggcgagctggccgcgctctgggccgccgcctccggaactccctgcgcctggcgcgcggccaccgtggtcccggcaacggcattaaacagagggaaacagacccgggattccgtcacccgggcggggggataaggacggctttgagagcagacaggaaaagggagcttttctgcatggggtgaaaaaattatttattgaaggaggaggaggcggcagcggaggaaggggaggggcgggaggaggaggaagagccggccgcccccgccccggccccggctcctcaggagccaagggcagcctcgccaggtcggtcccgggctcgaggaccgcggctggggtcgaggggctcagtctcccacgtgaccggctgggcgcgccccgccagacccggcctcgggattccctcctcccggcgagtctccgcccgccccgtcctggaggtggggagaaggagggcggggcgggggggacggaaactctccccgccaaatcctggccccaggcctggggacactcgcggcgggaagatttggaggggaggggagggggaggggcgtgggggcgcggcctcgctggagtccccctgaccccccgacccccgcccaccggcctgggcgtcctcccgcggcccctcctcccctcccggcgcccggtgctctggggcgcgtgccacgcctggctcggcgccgtaggggcccccgcaggtagagacccctggaaatggcctcgacgccgcaggagcgaggcggccaccaccccgctaatccgggcacgtctctccaggccgaggcctgcggtggaaaagccggggttccatttgtgctgagtcggggcggccgaatggagccaggcctcgggacgcgggacggacgggctctggccgcgcaccttcgcgggctctgcagcgcccgaccgcctcccccggcagggaggaggcgcttgtggggggcacccacggggcacagtgatccctgggggtctgcggacctcctgggccccgcagcagacacgagtttagcctttgggtttagtttaaatcacataagggtgtcgtgcaatcgatttatggtttctacacaccagacactttaacctccaaccccccccatccaagccaacaagaaaatgcggtgccgtgttggcagctgagctgcgcccgaagagacgcagggagacgtaagagaggaaagtgtgagtggccggggggcctccccccgtcagaagtcgcgcagtcgcgcccataaaacgccccctccgggcggctagggcaggtgagcgcgtccccgggcctccccacgccggcccctgccacagagccgtctaggtcgagcagatatttacagaataaaaatgacaataactcgacgtcccgggacggccacgcaatctgttagtaatttagcgggatgggaatttcctttctagggcctgccagtgaagcgcttttccaaatttccacagcgggggaagcctgcgattttacataatgacttcagcatgccgggctttctcgacacccctccccggcccccggcccccgccccccgccccttttccagcagggccgggctccctccggacacccgcgtggactcaggcgtcccgtctggcccgttcgcccccgtttcccccgccagccccagcgcccccctgcccggcccccggattccccgttcccgcccctacgcccccatcccctccccgtgcgcccctccccgtgcgcccccctccccgtgcgccccccctccccgtgcgcccccctccccgtgcgccccccctccccgggcgcccccctccccgggcgccccccctccccgtgcgcccccccctccccgtgcgccccccctccccgtgcgcgccccgcctcttgcgcccctgcccccaggcgagcggctgccgcggcgcggggaggggcgggcgctcggcgactcgtccccggggccccgcgcgggcccgggcagcaggggcgtgatgtcacggcagggagggggcgcgggagccgccgggccggcggggaggcgggggaggtgttttccagctttaaaaaggcaggaggcagagcgcggccctgcgtcagagcgagactcagaggtctagagccaccatgttccaaacctttgagggcgacctcaagtggcaccaccacaacatcacctattggatccaaaactactcggaagacttgccgcgggcggtgattgacgacgcctttgcccgcgccttcgcactgtggagcgcggtgacgccgctcaccttcactcgcgtgtacagccgggacgcagacatcgtcatccagtttggtgtcgcggagcacggagacgggtatcccttcgacgggaaggacgggctcctggcacacgcctttcctcctggccccggcattcagggagacgcccatttcgacgatgacgagttgtggtccctgggcaagggcgtcgtggttccaactcggtttggaaacgcagatggcgcggcctgccacttccccttcatcttcgagggccgctcctactctgcctgcaccaccgacggtcgctccgacggcttgccctggtgcagtaccacggccaactacgacaccgacgaccggtttggcttctgccccagcgagagactctacacccaggacggcaatgctgatgggaaaccctgccagtttccattcatcttccaaggccaatcctactccgcctgcaccacggacggtcgctccgacggctaccgctggtgcgccaccaccgccaactacgaccgggacaagctcttcggcttctgcccgacccgagctgactcgacggtgatggggggcaactcggcgggggagctgtgcgtcttccccttcactttcctgggtaaggagtactcgacctgtaccagcgagggccgcggagatgggcgcctctggtgcgctaccacctcgaactttgacagcgacaagaagtggggcttctgcccggaccaaggatacagtttgttcctcgtggcggcgcatgagttcggccacgcgctgggcttagatcattcctcagtgccggaggcgctcatgtaccctatgtaccgcttcactgaggggccccccttgcataaggacgacgtgaatggcatccggcacctctatggtcctcgccctgaacctgattacaaggatgacgacgataagtgataa

SEQ ID NO: 649 - DNA, 30 bp, Artificial Sequence
  NFAT response element
ggaggaaaaactgtttcatacagaaggcgt

SEQ ID NO: 650 - DNA, 90 bp, Artificial Sequence
  NFAT response element repeats
ggaggaaaaactgtttcatacagaaggcgtggaggaaaaactgtttcatacagaaggcgtggaggaaaaactgtttcatacagaaggcgt

SEQ ID NO: 651 - DNA, 61 bp, Artificial Sequence
  CMV minimal promoter
aggtaggcgtgtacggtgggaggtctatataagcagagctggtttagtgaaccgtcagatc

SEQ ID NO: 652 - DNA, 2326 bp, Artificial Sequence
  NFATREmCMVMMP9
ggaggaaaaactgtttcatacagaaggcgtggaggaaaaactgtttcatacagaaggcgtggaggaaaaactgtttcatacagaaggcgtagatctagactcaggtaggcgtgtacggtgggaggtctatataagcagagctggtttagtgaaccgtcagatctctagagccaccatgagcctctggcagcccctggtcctggtgctcctggtgctgggctgctgctttgctgcccccagacagcgccagtccacccttgtgctcttccctggagacctgagaaccaatctcaccgacaggcagctggcagaggaatacctgtaccgctatggttacactcgggtggcagagatgcgtggagagtcgaaatctctggggcctgcgctgctgcttctccagaagcaactgtccctgcccgagaccggtgagctggatagcgccacgctgaaggccatgcgaaccccacggtgcggggtcccagacctgggcagattccaaacctttgagggcgacctcaagtggcaccaccacaacatcacctattggatccaaaactactcggaagacttgccgcgggcggtgattgacgacgcctttgcccgcgccttcgcactgtggagcgcggtgacgccgctcaccttcactcgcgtgtacagccgggacgcagacatcgtcatccagtttggtgtcgcggagcacggagacgggtatcccttcgacgggaaggacgggctcctggcacacgcctttcctcctggccccggcattcagggagacgcccatttcgacgatgacgagttgtggtccctgggcaagggcgtcgtggttccaactcggtttggaaacgcagatggcgcggcctgccacttccccttcatcttcgagggccgctcctactctgcctgcaccaccgacggtcgctccgacggcttgccctggtgcagtaccacggccaactacgacaccgacgaccggtttggcttctgccccagcgagagactctacacccaggacggcaatgctgatgggaaaccctgccagtttccattcatcttccaaggccaatcctactccgcctgcaccacggacggtcgctccgacggctaccgctggtgcgccaccaccgccaactacgaccgggacaagctcttcggcttctgcccgacccgagctgactcgacggtgatggggggcaactcggcgggggagctgtgcgtcttccccttcactttcctgggtaaggagtactcgacctgtaccagcgagggccgcggagatgggcgcctctggtgcgctaccacctcgaactttgacagcgacaagaagtggggcttctgcccggaccaaggatacagtttgttcctcgtggcggcgcatgagttcggccacgcgctgggcttagatcattcctcagtgccggaggcgctcatgtaccctatgtaccgcttcactgaggggccccccttgcataaggacgacgtgaatggcatccggcacctctatggtcctcgccctgaacctgagccacggcctccaaccaccaccacaccgcagcccacggctcccccgacggtctgccccaccggaccccccactgtccacccctcagagcgccccacagctggccccacaggtcccccctcagctggccccacaggtccccccactgctggcccttctacggccactactgtgcctttgagtccggtggacgatgcctgcaacgtgaacatcttcgacgccatcgcggagattgggaaccagctgtatttgttcaaggatgggaagtactggcgattctctgagggcagggggagccggccgcagggccccttccttatcgccgacaagtggcccgcgctgccccgcaagctggactcggtctttgaggagcggctctccaagaagcttttcttcttctctgggcgccaggtgtgggtgtacacaggcgcgtcggtgctgggcccgaggcgtctggacaagctgggcctgggagccgacgtggcccaggtgaccggggccctccggagtggcagggggaagatgctgctgttcagcgggcggcgcctctggaggttcgacgtgaaggcgcagatggtggatccccggagcgccagcgaggtggaccggatgttccccggggtgcctttggacacgcacgacgtcttccagtaccgagagaaagcctatttctgccaggaccgcttctactggcgcgtgagttcccggagtgagttgaaccaggtggaccaagtgggctacgtgacctatgacatcctgcagtgccctgaggacgattacaaggatgacgacgataagtgataa

SEQ ID NO: 653 - DNA, 1237 bp, Artificial Sequence
  NFATREmCMVMMP9cat
ggaggaaaaactgtttcatacagaaggcgtggaggaaaaactgtttcatacagaaggcgtggaggaaaaactgtttcatacagaaggcgtagatctagactcaggtaggcgtgtacggtgggaggtctatataagcagagctggtttagtgaaccgtcagatctctagagccaccatgttccaaacctttgagggcgacctcaagtggcaccaccacaacatcacctattggatccaaaactactcggaagacttgccgcgggcggtgattgacgacgcctttgcccgcgccttcgcactgtggagcgcggtgacgccgctcaccttcactcgcgtgtacagccgggacgcagacatcgtcatccagtttggtgtcgcggagcacggagacgggtatcccttcgacgggaaggacgggctcctggcacacgcctttcctcctggccccggcattcagggagacgcccatttcgacgatgacgagttgtggtccctgggcaagggcgtcgtggttccaactcggtttggaaacgcagatggcgcggcctgccacttccccttcatcttcgagggccgctcctactctgcctgcaccaccgacggtcgctccgacggcttgccctggtgcagtaccacggccaactacgacaccgacgaccggtttggcttctgccccagcgagagactctacacccaggacggcaatgctgatgggaaaccctgccagtttccattcatcttccaaggccaatcctactccgcctgcaccacggacggtcgctccgacggctaccgctggtgcgccaccaccgccaactacgaccgggacaagctcttcggcttctgcccgacccgagctgactcgacggtgatggggggcaactcggcgggggagctgtgcgtcttccccttcactttcctgggtaaggagtactcgacctgtaccagcgagggccgcggagatgggcgcctctggtgcgctaccacctcgaactttgacagcgacaagaagtggggcttctgcccggaccaaggatacagtttgttcctcgtggcggcgcatgagttcggccacgcgctgggcttagatcattcctcagtgccggaggcgctcatgtaccctatgtaccgcttcactgaggggccccccttgcataaggacgacgtgaatggcatccggcacctctatggtcctcgccctgaacctgattacaaggatgacgacgataagtgataa

SEQ ID NO: 654 - DNA, 747 bp, Artificial Sequence; identical to SEQ ID NO: 238
  C2 scFv

SEQ ID NO: 655 - protein, 249 aa, Artificial Sequence; identical to SEQ ID NO: 239
  C2 scFv

SEQ ID NO: 656 - DNA, 72 bp, Artificial Sequence
  CD8 transmembrane domain
atctacatctgggcgcccttggccgggacttgtggggtccttctcctgtcactggttatcaccctttactgc

SEQ ID NO: 657 - protein, 24 aa, Artificial Sequence
  CD8 transmembrane domain
IYIWAPLAGTCGVLLLSLVITLYC

SEQ ID NO: 658 - DNA, 126 bp, Artificial Sequence
  41BB domain
aaacggggcagaaagaaactcctgtatatattcaaacaaccatttatgagaccagtacaaactactcaagaggaagatggctgtagctgccgatttccagaagaagaagaaggaggatgtgaactg

SEQ ID NO: 659 - protein, 42 aa, Artificial Sequence; identical to SEQ ID NO: 380
  41BB domain

SEQ ID NO: 660 - DNA, 336 bp, Artificial Sequence
  CD3zeta domain
agagtgaagttcagcaggagcgcagacgcccccgcgtacaagcagggccagaaccagctctataacgagctcaatctaggacgaagagaggagtacgatgttttggacaagagacgtggccgggaccctgagatggggggaaagccgagaaggaagaaccctcaggaaggcctgtacaatgaactgcagaaagataagatggcggaggcctacagtgagattgggatgaaaggcgagcgccggaggggcaaggggcacgatggcctttaccagggtctcagtacagccaccaaggacacctacgacgcccttcacatgcaggccctgccccctcgc

SEQ ID NO: 661 - protein, 112 aa, Artificial Sequence; identical to SEQ ID NO: 374
  CD3zeta domain

SEQ ID NO: 662-717 - skipped (56 entries)

SEQ ID NO: 718 - DNA, 1485 bp, Artificial Sequence
  CART C2 CD8/CD8/41BB/CD3z #44 - NCD8lshuMNC2scFvCD8ecd fragment CD8 transmembrane 41BB CD3zetaC
atggccttaccagtgaccgccttgctcctgccgctggccttgctgctccacgccgccaggccggaggtgcagctggtggagtctgggggaggcctggtcaagcctggggggtccctgagactctcctgtgcagcctctggattcaccttcagtggctatgccatgagctgggtccgccaggctccagggaaggggctggagtgggtctcaaccattagtagtggcggaacctacatatactaccccgactcagtgaagggccgattcaccatctccagagacaacgccaagaactcactgtatctgcaaatgaacagcctgagagccgaggacacggccgtgtattactgtgcgagacttgggggggataattactacgaatacttcgatgtctggggcaaagggaccacggtcaccgtctcctccggcggtggcggatccggcggtggcggatccggcggtggcggatccgacattgtgctgacccagtctccagcctccttggccgtgtctccaggacagagggccaccatcacctgcagagccagtaagagtgtcagtaccagcggatactcctacatgcactggtatcagcagaaaccaggacaacctcctaaactcctgatttacctggcatccaatctggagagcggggtcccagccaggttcagcggcagtgggtctgggaccgatttcaccctcacaattaatcctgtggaagctaatgatactgcaaattattactgtcagcacagtagggagctgcctttcacattcggcggagggaccaaggtggagatcaaacgaactacaacaacccctgcccccagacctcctaccccagcccctacaattgccagccagcctctgagcctgaggcccgaggcttgtagacctgctgctggcggagccgtgcacaccagaggactggatttcgcctgcgacatctacatctgggcgcccttggccgggacttgtggggtccttctcctgtcactggttatcaccctttactgcaaacggggcagaaagaaactcctgtatatattcaaacaaccatttatgagaccagtacaaactactcaagaggaagatggctgtagctgccgatttccagaagaagaagaaggaggatgtgaactgagagtgaagttcagcaggagcgcagacgcccccgcgtacaagcagggccagaaccagctctataacgagctcaatctaggacgaagagaggagtacgatgttttggacaagagacgtggccgggaccctgagatggggggaaagccgagaaggaagaaccctcaggaaggcctgtacaatgaactgcagaaagataagatggcggaggcctacagtgagattgggatgaaaggcgagcgccggaggggcaaggggcacgatggcctttaccagggtctcagtacagccaccaaggacacctacgacgcccttcacatgcaggccctgccccctcgctgataa

SEQ ID NO: 719 - protein, 493 aa, Artificial Sequence; identical to SEQ ID NO: 611
  CART C2 CD8/CD8/41BB/CD3z #44 - NCD8lshuMNC2scFvCD8ecd fragment CD8 transmembrane 41BB CD3zetaC

SEQ ID NO: 720-773 - skipped (54 entries)

SEQ ID NO: 774 - DNA, 3829 bp, Artificial Sequence
  NFATc1P2MMP9
caggcctggggacactcgcggcgggaagatttggaggggaggggagggggaggggcgtgggggcgcggcctcgctggagtccccctgaccccccgacccccgcccaccggcctgggcgtcctcccgcggcccctcctcccctcccggcgcccggtgctctggggcgcgtgccacgcctggctcggcgccgtaggggcccccgcaggtagagacccctggaaatggcctcgacgccgcaggagcgaggcggccaccaccccgctaatccgggcacgtctctccaggccgaggcctgcggtggaaaagccggggttccatttgtgctgagtcggggcggccgaatggagccaggcctcgggacgcgggacggacgggctctggccgcgcaccttcgcgggctctgcagcgcccgaccgcctcccccggcagggaggaggcgcttgtggggggcacccacggggcacagtgatccctgggggtctgcggacctcctgggccccgcagcagacacgagtttagcctttgggtttagtttaaatcacataagggtgtcgtgcaatcgatttatggtttctacacaccagacactttaacctccaaccccccccatccaaagccaacaagaaaatgcggtgccgtgttggcagctgagctgcgcccgaagagacgcagggagacgtaagagaggaaagtgtgagtggccggggggcctccccccgtcagaagtcgcgcagtcgcgcccataaaacgccccctccgggcggctagggcaggtgagcgcgtccccgggcctccccacgccggcccctgccacaggccgtctaggtcgagcagatatttacagaataaaaatgacaataactcgacgtcccgggacggccacgcaatctgttagtaatttagcgggatgggaatttcctttctagggcctgccagtgaagcgcttttccaaatttccacagcgggggaagcctgcgattttacataatgacttcagcatgccgggctttctcgacacccctccccggcccccggcccccgccccccgccccttttccagcagggccgggctccctccggacacccgcgtggactcaggcgtcccgtctggcccgttcgcccccgtttcccccgccagccccagcgcccccctgcccggcccccggattccccgttcccgcccctacgcccccatcccctccccgtgcgcccctccccgtgcgcccccctccccgtgcgccccccctccccgtgcgcccccctccccgtgcgccccccctccccgggcgcccccctccccgggcgccccccctccccgtgcgcccccccctccccgtgcgccccccctccccgtgcgcgccccgcctcttgcgcccctgcccccaggcgagcggctgccgcggcgcggggaggggcgggcgctcggcgactcgtccccggggccccgcgcgggcccgggcagcaggggcgtgatgtcacggcagggagggggcgcgggagccgccgggccggcggggaggcgggggaggtgttttccagctttaaaaaggcaggaggcagagcgcggccctgcgtcagagcgagactcagaggctccgaactcgccggcggagtcgccgcgccagatcccagcagcagggcgcggaagcttctctcgacattcgtttctagagccaccatgagcctctggcagcccctggtcctggtgctcctggtgctgggctgctgctttgctgcccccagacagcgccagtccacccttgtgctcttccctggagacctgagaaccaatctcaccgacaggcagctggcagaggaatacctgtaccgctatggttacactcgggtggcagagatgcgtggagagtcgaaatctctggggcctgcgctgctgcttctccagaagcaactgtccctgcccgagaccggtgagctggatagcgccacgctgaaggccatgcgaaccccacggtgcggggtcccagacctgggcagattccaaacctttgagggcgacctcaagtggcaccaccacaacatcacctattggatccaaaactactcggaagacttgccgcgggcggtgattgacgacgcctttgcccgcgccttcgcactgtggagcgcggtgacgccgctcaccttcactcgcgtgtacagccgggacgcagacatcgtcatccagtttggtgtcgcggagcacggagacgggtatcccttcgacgggaaggacgggctcctggcacacgcctttcctcctggccccggcattcagggagacgcccatttcgacgatgacgagttgtggtccctgggcaagggcgtcgtggttccaactcggtttggaaacgcagatggcgcggcctgccacttccccttcatcttcgagggccgctcctactctgcctgcaccaccgacggtcgctccgacggcttgccctggtgcagtaccacggccaactacgacaccgacgaccggtttggcttctgccccagcgagagactctacacccaggacggcaatgctgatgggaaaccctgccagtttccattcatcttccaaggccaatcctactccgcctgcaccacggacggtcgctccgacggctaccgctggtgcgccaccaccgccaactacgaccgggacaagctcttcggcttctgcccgacccgagctgactcgacggtgatggggggcaactcggcgggggagctgtgcgtcttccccttcactttcctgggtaaggagtactcgacctgtaccagcgagggccgcggagatgggcgcctctggtgcgctaccacctcgaactttgacagcgacaagaagtggggcttctgcccggaccaaggatacagtttgttcctcgtggcggcgcatgagttcggccacgcgctgggcttagatcattcctcagtgccggaggcgctcatgtaccctatgtaccgcttcactgaggggccccccttgcataaggacgacgtgaatggcatccggcacctctatggtcctcgccctgaacctgagccacggcctccaaccaccaccacaccgcagcccacggctcccccgacggtctgccccaccggaccccccactgtccacccctcagagcgccccacagctggccccacaggtcccccctcagctggccccacaggtccccccactgctggcccttctacggccactactgtgcctttgagtccggtggacgatgcctgcaacgtgaacatcttcgacgccatcgcggagattgggaaccagctgtatttgttcaaggatgggaagtactggcgattctctgagggcagggggagccggccgcagggccccttccttatcgccgacaagtggcccgcgctgccccgcaagctggactcggtctttgaggagcggctctccaagaagcttttcttcttctctgggcgccaggtgtgggtgtacacaggcgcgtcggtgctgggcccgaggcgtctggacaagctgggcctgggagccgacgtggcccaggtgaccggggccctccggagtggcagggggaagatgctgctgttcagcgggcggcgcctctggaggttcgacgtgaaggcgcagatggtggatccccggagcgccagcgaggtggaccggatgttccccggggtgcctttggacacgcacgacgtcttccagtaccgagagaaagcctatttctgccaggaccgcttctactggcgcgtgagttcccggagtgagttgaaccaggtggaccaagtgggctacgtgacctatgacatcctgcagtgccctgaggacgattacaaggatgacgacgataagtgataa

SEQ ID NO: 775 - DNA, 2794 bp, Artificial Sequence
  NFATc1P2MMP9cat
caggcctggggacactcgcggcgggaagatttggaggggaggggagggggaggggcgtgggggcgcggcctcgctggagtccccctgaccccccgacccccgcccaccggcctgggcgtcctcccgcggcccctcctcccctcccggcgcccggtgctctggggcgcgtgccacgcctggctcggcgccgtaggggcccccgcaggtagagacccctggaaatggcctcgacgccgcaggagcgaggcggccaccaccccgctaatccgggcacgtctctccaggccgaggcctgcggtggaaaagccggggttccatttgtgctgagtcggggcggccgaatggagccaggcctcgggacgcgggacggacgggctctggccgcgcaccttcgcgggctctgcagcgcccgaccgcctcccccggcagggaggaggcgcttgtggggggcacccacggggcacagtgatccctgggggtctgcggacctcctgggccccgcagcagacacgagtttagcctttgggtttagtttaaatcacataagggtgtcgtgcaatcgatttatggtttctacacaccagacactttaacctccaaccccccccatccaaagccaacaagaaaatgcggtgccgtgttggcagctgagctgcgcccgaagagacgcagggagacgtaagagaggaaagtgtgagtggccggggggcctccccccgtcagaagtcgcgcagtcgcgcccataaaacgccccctccgggcggctagggcaggtgagcgcgtccccgggcctccccacgccggcccctgccacaggccgtctaggtcgagcagatatttacagaataaaaatgacaataactcgacgtcccgggacggccacgcaatctgttagtaatttagcgggatgggaatttcctttctagggcctgccagtgaagcgcttttccaaatttccacagcgggggaagcctgcgattttacataatgacttcagcatgccgggctttctcgacacccctccccggcccccggcccccgccccccgccccttttccagcagggccgggctccctccggacacccgcgtggactcaggcgtcccgtctggcccgttcgcccccgtttcccccgccagccccagcgcccccctgcccggcccccggattccccgttcccgcccctacgcccccatcccctccccgtgcgcccctccccgtgcgcccccctccccgtgcgccccccctccccgtgcgcccccctccccgtgcgccccccctccccgggcgcccccctccccgggcgccccccctccccgtgcgcccccccctccccgtgcgccccccctccccgtgcgcgccccgcctcttgcgcccctgcccccaggcgagcggctgccgcggcgcggggaggggcgggcgctcggcgactcgtccccggggccccgcgcgggcccgggcagcaggggcgtgatgtcacggcagggagggggcgcgggagccgccgggccggcggggaggcgggggaggtgttttccagctttaaaaaggcaggaggcagagcgcggccctgcgtcagagcgagactcagaggctccgaactcgccggcggagtcgccgcgccagatcccagcagcagggcgcggaagcttctctcgacattcgtttctagagccaccatgagcctctggcagcccctggtcctggtgctcctggtgctgggctgctgctttgctttccaaacctttgagggcgacctcaagtggcaccaccacaacatcacctattggatccaaaactactcggaagacttgccgcgggcggtgattgacgacgcctttgcccgcgccttcgcactgtggagcgcggtgacgccgctcaccttcactcgcgtgtacagccgggacgcagacatcgtcatccagtttggtgtcgcggagcacggagacgggtatcccttcgacgggaaggacgggctcctggcacacgcctttcctcctggccccggcattcagggagacgcccatttcgacgatgacgagttgtggtccctgggcaagggcgtcgtggttccaactcggtttggaaacgcagatggcgcggcctgccacttccccttcatcttcgagggccgctcctactctgcctgcaccaccgacggtcgctccgacggcttgccctggtgcagtaccacggccaactacgacaccgacgaccggtttggcttctgccccagcgagagactctacacccaggacggcaatgctgatgggaaaccctgccagtttccattcatcttccaaggccaatcctactccgcctgcaccacggacggtcgctccgacggctaccgctggtgcgccaccaccgccaactacgaccgggacaagctcttcggcttctgcccgacccgagctgactcgacggtgatggggggcaactcggcgggggagctgtgcgtcttccccttcactttcctgggtaaggagtactcgacctgtaccagcgagggccgcggagatgggcgcctctggtgcgctaccacctcgaactttgacagcgacaagaagtggggcttctgcccggaccaaggatacagtttgttcctcgtggcggcgcatgagttcggccacgcgctgggcttagatcattcctcagtgccggaggcgctcatgtaccctatgtaccgcttcactgaggggccccccttgcataaggacgacgtgaatggcatccggcacctctatggtcctcgccctgaacctgattacaaggatgacgacgataagtgataa

SEQ ID NO: 776 - DNA, 32 bp, Artificial Sequence
  NFAT response element 2
aagaggaaaatttgtttcatacagaaggcgtt

SEQ ID NO: 777 - DNA, 128 bp, Artificial Sequence
  NFAT response element 2 repeats
aagaggaaaatttgtttcatacagaaggcgttaagaggaaaatttgtttcatacagaaggcgttaagaggaaaatttgtttcatacagaaggcgttaagaggaaaatttgtttcatacagaaggcgtt

SEQ ID NO: 778 - DNA, 118 bp, Artificial Sequence
  CMV minimal promoter 2
taggcgtgtacggtgggaggcctatataagcagagctcgtttagtgaaccgtcagatcgcctggagacgccatccacgctgttttgacctccatagaagacaccgggaccgatccagc

SEQ ID NO: 779 - DNA, 2430 bp, Artificial Sequence
  NFATRE2mCMV2MMP9
aagaggaaaatttgtttcatacagaaggcgttaagaggaaaatttgtttcatacagaaggcgttaagaggaaaatttgtttcatacagaaggcgttaagaggaaaatttgtttcatacagaaggcgttactagttaggcgtgtacggtgggaggcctatataagcagagctcgtttagtgaaccgtcagatcgcctggagacgccatccacgctgttttgacctccatagaagacaccgggaccgatccagcctctcgacattcgtttctagagccaccatgagcctctggcagcccctggtcctggtgctcctggtgctgggctgctgctttgctgcccccagacagcgccagtccacccttgtgctcttccctggagacctgagaaccaatctcaccgacaggcagctggcagaggaatacctgtaccgctatggttacactcgggtggcagagatgcgtggagagtcgaaatctctggggcctgcgctgctgcttctccagaagcaactgtccctgcccgagaccggtgagctggatagcgccacgctgaaggccatgcgaaccccacggtgcggggtcccagacctgggcagattccaaacctttgagggcgacctcaagtggcaccaccacaacatcacctattggatccaaaactactcggaagacttgccgcgggcggtgattgacgacgcctttgcccgcgccttcgcactgtggagcgcggtgacgccgctcaccttcactcgcgtgtacagccgggacgcagacatcgtcatccagtttggtgtcgcggagcacggagacgggtatcccttcgacgggaaggacgggctcctggcacacgcctttcctcctggccccggcattcagggagacgcccatttcgacgatgacgagttgtggtccctgggcaagggcgtcgtggttccaactcggtttggaaacgcagatggcgcggcctgccacttccccttcatcttcgagggccgctcctactctgcctgcaccaccgacggtcgctccgacggcttgccctggtgcagtaccacggccaactacgacaccgacgaccggtttggcttctgccccagcgagagactctacacccaggacggcaatgctgatgggaaaccctgccagtttccattcatcttccaaggccaatcctactccgcctgcaccacggacggtcgctccgacggctaccgctggtgcgccaccaccgccaactacgaccgggacaagctcttcggcttctgcccgacccgagctgactcgacggtgatggggggcaactcggcgggggagctgtgcgtcttccccttcactttcctgggtaaggagtactcgacctgtaccagcgagggccgcggagatgggcgcctctggtgcgctaccacctcgaactttgacagcgacaagaagtggggcttctgcccggaccaaggatacagtttgttcctcgtggcggcgcatgagttcggccacgcgctgggcttagatcattcctcagtgccggaggcgctcatgtaccctatgtaccgcttcactgaggggccccccttgcataaggacgacgtgaatggcatccggcacctctatggtcctcgccctgaacctgagccacggcctccaaccaccaccacaccgcagcccacggctcccccgacggtctgccccaccggaccccccactgtccacccctcagagcgccccacagctggccccacaggtcccccctcagctggccccacaggtccccccactgctggcccttctacggccactactgtgcctttgagtccggtggacgatgcctgcaacgtgaacatcttcgacgccatcgcggagattgggaaccagctgtatttgttcaaggatgggaagtactggcgattctctgagggcagggggagccggccgcagggccccttccttatcgccgacaagtggcccgcgctgccccgcaagctggactcggtctttgaggagcggctctccaagaagcttttcttcttctctgggcgccaggtgtgggtgtacacaggcgcgtcggtgctgggcccgaggcgtctggacaagctgggcctgggagccgacgtggcccaggtgaccggggccctccggagtggcagggggaagatgctgctgttcagcgggcggcgcctctggaggttcgacgtgaaggcgcagatggtggatccccggagcgccagcgaggtggaccggatgttccccggggtgcctttggacacgcacgacgtcttccagtaccgagagaaagcctatttctgccaggaccgcttctactggcgcgtgagttcccggagtgagttgaaccaggtggaccaagtgggctacgtgacctatgacatcctgcagtgccctgaggacgattacaaggatgacgacgataagtgataa

SEQ ID NO: 780 - DNA, 1401 bp, Artificial Sequence
  NFATRE2mCMV2MMP9cat
aagaggaaaatttgtttcatacagaaggcgttaagaggaaaatttgtttcatacagaaggcgttaagaggaaaatttgtttcatacagaaggcgttaagaggaaaatttgtttcatacagaaggcgttactagttaggcgtgtacggtgggaggcctatataagcagagctcgtttagtgaaccgtcagatcgcctggagacgccatccacgctgttttgacctccatagaagacaccgggaccgatccagcctcgagctctcgacattcgtttctagagccaccatgagcctctggcagcccctggtcctggtgctcctggtgctgggctgctgctttgctttccaaacctttgagggcgacctcaagtggcaccaccacaacatcacctattggatccaaaactactcggaagacttgccgcgggcggtgattgacgacgcctttgcccgcgccttcgcactgtggagcgcggtgacgccgctcaccttcactcgcgtgtacagccgggacgcagacatcgtcatccagtttggtgtcgcggagcacggagacgggtatcccttcgacgggaaggacgggctcctggcacacgcctttcctcctggccccggcattcagggagacgcccatttcgacgatgacgagttgtggtccctgggcaagggcgtcgtggttccaactcggtttggaaacgcagatggcgcggcctgccacttccccttcatcttcgagggccgctcctactctgcctgcaccaccgacggtcgctccgacggcttgccctggtgcagtaccacggccaactacgacaccgacgaccggtttggcttctgccccagcgagagactctacacccaggacggcaatgctgatgggaaaccctgccagtttccattcatcttccaaggccaatcctactccgcctgcaccacggacggtcgctccgacggctaccgctggtgcgccaccaccgccaactacgaccgggacaagctcttcggcttctgcccgacccgagctgactcgacggtgatggggggcaactcggcgggggagctgtgcgtcttccccttcactttcctgggtaaggagtactcgacctgtaccagcgagggccgcggagatgggcgcctctggtgcgctaccacctcgaactttgacagcgacaagaagtggggcttctgcccggaccaaggatacagtttgttcctcgtggcggcgcatgagttcggccacgcgctgggcttagatcattcctcagtgccggaggcgctcatgtaccctatgtaccgcttcactgaggggccccccttgcataaggacgacgtgaatggcatccggcacctctatggtcctcgccctgaacctgattacaaggatgacgacgataagtgataa

SEQ ID NO: 781 - DNA, 2238 bp, Artificial Sequence
  NFATc1 Promoter fragment (P1)
aggcaggaggaagaggaaaggggcgcagggcgctcggggagcagagccgggggcccgcggtggccgcagaggccgggccggggcgcagaggccgggcgagctggccgcgctctgggccgccgcctccggaactccctgcgcctggcgcgcggccaccgtggtcccggcaacggcattaaacagagggaaacagacccgggattccgtcacccgggcggggggataaggacggctttgagagcagacaggaaaagggagcttttctgcatggggtgaaaaaattatttattgaaggaggaggaggcggcagcggaggaaggggaggggcgggaggaggaggaagagccggccgcccccgccccggccccggctcctcaggagccaagggcagcctcgccaggtcggtcccgggctcgaggaccgcggctggggtcgaggggctcagtctcccacgtgaccggctgggcgcgccccgccagacccggcctcgggattccctcctcccggcgagtctccgcccgccccgtcctggaggtggggagaaggagggcggggcgggggggacggaaactctccccgccaaatcctggccccaggcctggggacactcgcggcgggaagatttggaggggaggggagggggaggggcgtgggggcgcggcctcgctggagtccccctgaccccccgacccccgcccaccggcctgggcgtcctcccgcggcccctcctcccctcccggcgcccggtgctctggggcgcgtgccacgcctggctcggcgccgtaggggcccccgcaggtagagacccctggaaatggcctcgacgccgcaggagcgaggcggccaccaccccgctaatccgggcacgtctctccaggccgaggcctgcggtggaaaagccggggttccatttgtgctgagtcggggcggccgaatggagccaggcctcgggacgcgggacggacgggctctggccgcgcaccttcgcgggctctgcagcgcccgaccgcctcccccggcagggaggaggcgcttgtggggggcacccacggggcacagtgatccctgggggtctgcggacctcctgggccccgcagcagacacgagtttagcctttgggtttagtttaaatcacataagggtgtcgtgcaatcgatttatggtttctacacaccagacactttaacctccaaccccccccatccaagccaacaagaaaatgcggtgccgtgttggcagctgagctgcgcccgaagagacgcagggagacgtaagagaggaaagtgtgagtggccggggggcctccccccgtcagaagtcgcgcagtcgcgcccataaaacgccccctccgggcggctagggcaggtgagcgcgtccccgggcctccccacgccggcccctgccacagagccgtctaggtcgagcagatatttacagaataaaaatgacaataactcgacgtcccgggacggccacgcaatctgttagtaatttagcgggatgggaatttcctttctagggcctgccagtgaagcgcttttccaaatttccacagcgggggaagcctgcgattttacataatgacttcagcatgccgggctttctcgacacccctccccggcccccggcccccgccccccgccccttttccagcagggccgggctccctccggacacccgcgtggactcaggcgtcccgtctggcccgttcgcccccgtttcccccgccagccccagcgcccccctgcccggcccccggattccccgttcccgcccctacgcccccatcccctccccgtgcgcccctccccgtgcgcccccctccccgtgcgccccccctccccgtgcgcccccctccccgtgcgccccccctccccgggcgcccccctccccgggcgccccccctccccgtgcgcccccccctccccgtgcgccccccctccccgtgcgcgccccgcctcttgcgcccctgcccccaggcgagcggctgccgcggcgcggggaggggcgggcgctcggcgactcgtccccggggccccgcgcgggcccgggcagcaggggcgtgatgtcacggcagggagggggcgcgggagccgccgggccggcggggaggcgggggaggtgttttccagctttaaaaaggcaggaggcagagcgcggccctgcgtcagagcgagactcagaggctccgaactcgccggcggagtcgccgcgccagatcccagcagcagggcgcgg

SEQ ID NO: 782 - DNA, 2186 bp, Artificial Sequence; identical to SEQ ID NO: 646
  NFATc1 Promoter fragment (P2)

SEQ ID NO: 783 - DNA, 1645 bp, Artificial Sequence
  NFATc1 Promoter fragment (P3)
caggcctggggacactcgcggcgggaagatttggaggggaggggagggggaggggcgtgggggcgcggcctcgctggagtccccctgaccccccgacccccgcccaccggcctgggcgtcctcccgcggcccctcctcccctcccggcgcccggtgctctggggcgcgtgccacgcctggctcggcgccgtaggggcccccgcaggtagagacccctggaaatggcctcgacgccgcaggagcgaggcggccaccaccccgctaatccgggcacgtctctccaggccgaggcctgcggtggaaaagccggggttccatttgtgctgagtcggggcggccgaatggagccaggcctcgggacgcgggacggacgggctctggccgcgcaccttcgcgggctctgcagcgcccgaccgcctcccccggcagggaggaggcgcttgtggggggcacccacggggcacagtgatccctgggggtctgcggacctcctgggccccgcagcagacacgagtttagcctttgggtttagtttaaatcacataagggtgtcgtgcaatcgatttatggtttctacacaccagacactttaacctccaaccccccccatccaaagccaacaagaaaatgcggtgccgtgttggcagctgagctgcgcccgaagagacgcagggagacgtaagagaggaaagtgtgagtggccggggggcctccccccgtcagaagtcgcgcagtcgcgcccataaaacgccccctccgggcggctagggcaggtgagcgcgtccccgggcctccccacgccggcccctgccacaggccgtctaggtcgagcagatatttacagaataaaaatgacaataactcgacgtcccgggacggccacgcaatctgttagtaatttagcgggatgggaatttcctttctagggcctgccagtgaagcgcttttccaaatttccacagcgggggaagcctgcgattttacataatgacttcagcatgccgggctttctcgacacccctccccggcccccggcccccgccccccgccccttttccagcagggccgggctccctccggacacccgcgtggactcaggcgtcccgtctggcccgttcgcccccgtttcccccgccagccccagcgcccccctgcccggcccccggattccccgttcccgcccctacgcccccatcccctccccgtgcgcccctccccgtgcgcccccctccccgtgcgccccccctccccgtgcgcccccctccccgtgcgccccccctccccgggcgcccccctccccgggcgccccccctccccgtgcgcccccccctccccgtgcgccccccctccccgtgcgcgccccgcctcttgcgcccctgcccccaggcgagcggctgccgcggcgcggggaggggcgggcgctcggcgactcgtccccggggccccgcgcgggcccgggcagcaggggcgtgatgtcacggcagggagggggcgcgggagccgccgggccggcggggaggcgggggaggtgttttccagctttaaaaaggcaggaggcagagcgcggccctgcgtcagagcgagactcagaggctccgaactcgccggcggagtcgccgcgccagatcccagcagcagggcgcgg

SEQ ID NO: 784 - DNA, 927 bp, Artificial Sequence
  pNFATMMP9cat1 gBLOCK sequence
aagaggaaaatttgtttcatacagaaggcgttactagttaggcgtgtacggtgggaggcctatataagcagagctcgtttagtgaaccgtcagatcgcctggagacgccatccacgctgttttgacctccatagaagacaccgggaccgatccagcctctcgacattcgtttctagagccaccatgagcctctggcagcccctggtcctggtgctcctggtgctgggctgctgctttgctttccaaacctttgagggcgacctcaagtggcaccaccacaacatcacctattggatccaaaactactcggaagacttgccgcgggcggtgattgacgacgcctttgcccgcgccttcgcactgtggagcgcggtgacgccgctcaccttcactcgcgtgtacagccgggacgcagacatcgtcatccagtttggtgtcgcggagcacggagacgggtatcccttcgacgggaaggacgggctcctggcacacgcctttcctcctggccccggcattcagggagacgcccatttcgacgatgacgagttgtggtccctgggcaagggcgtcgtggttccaactcggtttggaaacgcagatggcgcggcctgccacttccccttcatcttcgagggccgctcctactctgcctgcaccaccgacggtcgctccgacggcttgccctggtgcagtaccacggccaactacgacaccgacgaccggtttggcttctgccccagcgagagactctacacccaggacggcaatgctgatgggaaaccctgccagtttccattcatcttccaaggccaatcctactccgcctgcaccacggacggtcgctccgacggctaccgctggtgcgccaccaccgccaactacgaccgggacaagctcttcggcttctgcccgacccgagctgactcg

SEQ ID NO: 785-803 - skipped (19 entries)

SEQ ID NO: 804 - protein, 13 aa, Artificial Sequence
  NFAT consensus sequence
ATGGAAAANATCN

SEQ ID NO: 805 - DNA, 32 bp, Artificial Sequence; identical to SEQ ID NO: 776
  Current NFAT RE (Form System Biosciences. The sequence is from the mouse IL2 promoter.)

SEQ ID NO: 806 - DNA, 812 bp, Artificial Sequence
  Mouse IL2 Promoter (highlighted in green the NFAT RE used, highlighted in yellow is the start codon)
aactagagacatataaaataacaccaacatccttagatacaacccttcctgagaatttattggacatcatactctttttaaaaagcataataaacatcaagacacttacacaaaatatgttaaattaaatttaaaacaacaacgacaaaatagtacctcaagctcaacaagcattttaggtgtccttagcttactatttctctggctaactgtatgaagccatctatcaccctgtgtgcaattagctcattgtgtagataagaaggtaaaaccatcttgaaacaggaaaccaatatccttcctgtctaatcaacaaatctaaaagatttattcttttcatctatctcctcttgcgtttgtccaccacaacaggctgcttacaggttcaggatggttttgacaaagagaacattttcatgagttacttttgtgtctccaccccaaagaggaaaatttgtttcatacagaaggcgttcattgtatgaattaaaactgccacctaagtgtgggctaacccgaccaagagggatttcacctaaatccattcagtcagtgtatgggggtttaaagaaattccagagagtcatcagaagaggaaaaacaaaaggtaatgctttctgccacacaggtagactctttgaaaatatgtgtaatatgtaaaacatcgtgacacccccatattatttttccagcattaacagtataaattgcctcccatgctgaagagctgcctatcacccttgctaatcactcctcacagtgacctcaagtcctgcaggcatgtacagcatgcagctcgcatcctgtgtcac

SEQ ID NO: 807 - DNA, 30 bp, Artificial Sequence; identical to SEQ ID NO: 649
  NFAT RE (Form PRomega. The sequence is from the humane IL2 promoter.)

SEQ ID NO: 808 - DNA, 33 bp, Artificial Sequence
  Possible NFAT RE from ET1 promoter
tccagggaaaatcggagtagaacaagagggatg

SEQ ID NO: 809 - DNA, 34 bp, Artificial Sequence
  Possible NFAT RE from ET1 promoter
actgttggaaaacgtaaacacgttattaaacggt

SEQ ID NO: 810 - DNA, 20 bp, Artificial Sequence
  Possible NFAT RE from human CD3?
tccttaacggaaaaacaaaa

SEQ ID NO: 811 - DNA, 20 bp, Artificial Sequence
  Possible NFAT RE from human CD3?
aaaggaaaaagtatatgttc

SEQ ID NO: 812 - DNA, 17 bp, Artificial Sequence
  Possible NFAT RE from human IL3 promoter
atgccatggaaagggtg

SEQ ID NO: 813 - DNA, 22 bp, Artificial Sequence
  Possible NFAT RE from human GPC6
aaggggaaatgttgagtctaga

SEQ ID NO: 814 - DNA, 17 bp, Artificial Sequence
  Possible NFAT RE from human growth hormonereleasing hormone
aacttggaaaagcatag

SEQ ID NO: 815 - DNA, 5320 bp, Artificial Sequence
  NFATc1 promoter large
ttatgccgtctagaggagacatactttctactcaaagctacacacatagactacaacgatgggaaaagacgacacaccaacagcgacttcaggaaagctggagtggctgctaatgttagacaaaataggctttttaaaaaaggttttattaaagaggaatgtttcgtaatgataaaagcactaatctgtgagaaagatacaacaatgataaacatacgtgcagctaataagagagctccaaaatctatgaagcaaaaactcacagaatgaggggagaagcagttctacaacagagaatggggacttcgatactccactttcaataatggatacaacaaccaggcagataacaaggcaacagaaggcctgaacaacagtataaaccaattagacctaccagatatctatagctagcacactccacccaacgacagcagaatacacattcttctcaagcgcacaagtaacatcctccaggatgggccatgttctaggccatcaaacaaactcaggtggtttgaggccagaggcctctcttttaaccaccacactagggccttcggaggaggcaagcagagagttgtcaaagaggccctcaggactgggtgcagtggctcatgactgtaatcccagcactttagaaggctgaggcacaaggatcttttgagctcaggagttcaagaaatgagcacttatccactgggcgcggtggctcacgccagtaatccagcactttgggaggcttaggcgggcggatcaagaggtcagaagctcaagaccagcctgaccaacatggtgaaaccccgtctctactaaaagtacaaaaattagccgggcgtggtggcgcacacctgtaatcccagctacttgggaggctgaggcaggagaatcacttgaacccgggaggtggaggttgcagtgagtggagatcacaccattgcaccccagcctgggcaacagagcgagactccgtctcaaaaaaaaaaaaaaaaaaaaagaaagaaagaaaaagaaaaaaaaagtgagcatgtattttgccagagtctggagattagaattaaattagcaaaccagaattatagaaaaagctatttacttttaagtaaacagctgagatttttttttttaagtcagtgtgaatgaagctcacagccatggttggagctgagaaagaaggatttccctttagttatgcacctgtgtcagcaccttctgactttccttctaaagtctggggtgttcctgaggatccgtaagtttggggttcagggtttctacagcatgctgttacttgtgaaacatctctttaaccatgtcccagagttgcccaggagtttaagaccagcctgagcaacatagcaagacctcatctcaacaacaacaaaaattagaaataaattagccaggtgtggtgacatgtgcctgtagtcccagctactcagaaggctgaggcatgaggatcacttgggcccaggaagttggggctgcagggagccctgttcatgccgctgcactccagcctgcaagacagagcagaaaaaaagaatcaggatcctgggcagagggaggagaggggaccggggtccagcaagcacttggggattgactgaatggcgttggggagagatgactccaaagtcctggagtgggtgagaatgactgcgagtggcttttaggtggggaggttcctgcctggccactccgggaggggacgtggggctgaagggtatcaggtgccgtgctgagcagtttggccttgatcctaatgccctggacacacgtctagggtaggaaagttgactgatccattggtgatctgagtttttagacatggtggtagtccatgaggtgggtgttcatgctaagagtttagacagggaaacctatgaagcccttagcaaccctccagggaaggggcgtggttaaagagatgtttcataagtaacagcatggtatagaaactctgaaccccaaatgtatgggtcctcaggaacaccccagactttagaaggaaagtcagaaggtgctgacacgggtgtataactaaagggaaatccttctttctcagctccaaccatggctgtgaggttcattcacactgacttaaaaaaaaaaatctcagtttacttaaaagtaaatagctttttctataattctggtttgctaatttaatcctagtctccagaccctggctaaataaatgcccatttctccagatggtctcaagagtctctggacatcgtgggggcccttccctgttggttggaaggtgcctcaggaagaagggggtggattctgagttgagtcaaaacctcaaagacccctgatgggaaaagctctcaagtgaccaccgctgtgggccagaatgcaaaactgcaggaacagaacattcgcaggaacagaacacagtcgtattaagtgattttcccgagcaggaagtggcatctggcctgcggttcagtagggggaggaaagggtgggcgcacctgcccctggctggcgcacctgccaggtagccccacgcggcaccgcgtgtgccgagcgcccctgaggatggaaagccccacgcggggcaggtggcacccaccctccgaagacgggacgggatggagcgttgagcttcggggcagctccggcccggcccgcgctggagacgcccgcatctgccaggatggcgtctcatagccctggtgctcacacatgacgccaggaagccccagcaacagtgaccgcccaggctctagaaaatattggacggggtggatgaacacccaagtgcgctccaggagaagggatttggcaccccaaggggcttttaaaacggtaagcttctaggggtgtctttgcccccaataatccatagaaacaacagtcatctaaaaatagtcttgttttctgtcctaagctccttttaactttgttagtcatcaccaatcctaaaataaaacccgtgtaacgtctcccctagtagcggctataaacaaacctacgaggaggcaggaggaagaggaaaggggcgcagggcgctcggggagcagagccgggggcccgcggtggccgcagaggccgggccggggcgcagaggccgggcgagctggccgcgctctgggccgccgcctccggaactccctgcgcctggcgcgcggccaccgtggtcccggcaacggcattaaacagagggaaacagacccgggattccgtcacccgggcggggggataaggacggctttgagagcagacaggaaaagggagcttttctgcatggggtgaaaaaattatttattgaaggaggaggaggcggcagcggaggaaggggaggggcgggaggaggaggaagagccggccgcccccgccccggccccggctcctcaggagccaagggcagcctcgccaggtcggtcccgggctcgaggaccgcggctggggtcgaggggctcagtctcccacgtgaccggctgggcgcgccccgccagacccggcctcgggattccctcctcccggcgagtctccgcccgccccgtcctggaggtggggagaaggagggcggggcgggggggacggaaactctccccgccaaatcctggccccaggcctggggacactcgcggcgggaagatttggaggggaggggagggggaggggcgtgggggcgcggcctcgctggagtccccctgaccccccgacccccgcccaccggcctgggcgtcctcccgcggcccctcctcccctcccggcgcccggtgctctggggcgcgtgccacgcctggctcggcgccgtaggggcccccgcaggtagagacccctggaaatggcctcgacgccgcaggagcgaggcggccaccaccccgctaatccgggcacgtctctccaggccgaggcctgcggtggaaaagccggggttccatttgtgctgagtcggggcggccgaatggagccaggcctcgggacgcgggacggacgggctctggccgcgcaccttcgcgggctctgcagcgcccgaccgcctcccccggcagggaggaggcgcttgtggggggcacccacggggcacagtgatccctgggggtctgcggacctcctgggccccgcagcagacacgagtttagcctttgggtttagtttaaatcacataagggtgtcgtgcaatcgatttatggtttctacacaccagacactttaacctccaaccccccccatccaaagccaacaagaaaatgcggtgccgtgttggcagctgagctgcgcccgaagagacgcagggagacgtaagagaggaaagtgtgagtggccggggggcctccccccgtcagaagtcgcgcagtcgcgcccataaaacgccccctccgggcggctagggcaggtgagcgcgtccccgggcctccccacgccggcccctgccacaggccgtctaggtcgagcagatatttacagaataaaaatgacaataactcgacgtcccgggacggccacgcaatctgttagtaatttagcgggatgggaatttcctttctagggcctgccagtgaagcgcttttccaaatttccacagcgggggaagcctgcgattttacataatgacttcagcatgccgggctttctcgacacccctccccggcccccggcccccgccccccgccccttttccagcagggccgggctccctccggacacccgcgtggactcaggcgtcccgtctggcccgttcgcccccgtttcccccgccagccccagcgcccccctgcccggcccccggattccccgttcccgcccctacgcccccatcccctccccgtgcgcccctccccgtgcgcccccctccccgtgcgccccccctccccgtgcgcccccctccccgtgcgccccccctccccgggcgcccccctccccgggcgccccccctccccgtgcgcccccccctccccgtgcgccccccctccccgtgcgcgccccgcctcttgcgcccctgcccccaggcgagcggctgccgcggcgcggggaggggcgggcgctcggcgactcgtccccggggccccgcgcgggcccgggcagcaggggcgtgatgtcacggcagggagggggcgcgggagccgccgggccggcggggaggcgggggaggtgttttccagctttaaaaaggcaggaggcagagcgcggccctgcgtcagagcgagactcagaggctccgaactcgccggcggagtcgccgcgccagatcccagcagcagggcgcgggcaccggggcgcgggcagggctcggagccaccgcgcaggtcctagggccgcggccgggccccgccacgcgcgcacacgcccctcgatg

SEQ ID NO: 816 - DNA, 361 bp, Artificial Sequence
  NFATc3 promoter sequence
gcagccaggcagggtgggcgcgcgtagggggcggggccgggcgcgcggcagggcgcgagagcgcacccgcggcggcggtggcggcgactgtgggggggcggcggggaacattggctaagccgacagtggaggcttaggcaccggtggcgggcggctgcggttcctggtgctgctcggcgcgcggccagctttcggaacggaacgctcggcgtcgcgggccccgcccggaaagtttgccgtggagtcgcgacctcttggcccgcgcggcccggcatgaagcggcgttgaggagctgctgccgccgcttgccgctgccgccgccgccgcctgaggaggagctgcagcaccctgggccacgccg

SEQ ID NO: 817 - DNA, 430 bp, Artificial Sequence
  NFATc2 promoter sequence 1
cagagagaggctgcgttcagactggggcactgccatcccctccgcatcatggggtctgtggaccaaggtaactgactctcgatcccttccagccttttccgctcgctcctcccggccctttcctgctgctcccgtcccgggcagcactttcagctcccggcagaggtcggtgcgggaggcctggggaccccgctcgccctcggcgcacaggtagcggggcccgcggaggggcgcccgcgccccggccagggaagggacacttgggaaggcgactttggacaactttacgcgggggcagggaagtgtcccaggccgggattccctaggccagtctgtcgggaggattttcctctccacgggacaccgggagggattctcgctactaaccgctggctgtttaaccgtttcagcactcggcttttgacagcaa

SEQ ID NO: 818 - DNA, 64 bp, Artificial Sequence
  NFATc2 promoter sequence 2
catcatggggtctgtggaccaaggtaactgactctcgatcccttccagccttttccgctcgctc

SEQ ID NO: 819 - DNA, 12 bp, Artificial Sequence
  NFATc1 response element consensus
cattttttccat

SEQ ID NO: 820 - DNA, 8 bp, Artificial Sequence
  NFATc1 response element consensus
tttttcca

SEQ ID NO: 821 - DNA, 119 bp, Artificial Sequence
  NFAT response elements contained within the Foxp3 enhancer region
acttgaaaatgagataaatgttcacctatgttggcttctagtctcttttatggcttcattttttccatttactatagaggttaagagtgtgggtactggagccagactgtctgggacaa

SEQ ID NO: 822 - protein, 65 aa, Artificial Sequence
  N+20
SNIKFRPGSVVVQLTLAFREGTINVHDVETQFNQYKTEAASRYNLTISDVSVSDVPFPFSAQSGA

SEQ ID NO: 823 - protein, 38 aa, Artificial Sequence
  N+20/C27
SNIKFRPGSVVVQLTLAFREGTINVHDVETQFNQYKTE

SEQ ID NO: 824 - protein, 45 aa, Artificial Sequence
  N+9/C9
VQLTLAFREGTINVHDVETQFNQYKTEAASRYNLTISDVSVSDVP

SEQ ID NO: 825 - protein, 35 aa, Artificial Sequence
  C10
GTINVHDVETQFNQYKTEAASRYNLTISDVSVSDV

SEQ ID NO: 826 - DNA, 885 bp, Artificial Sequence
  NME7AB
atggaaaaaacgctggccctgattaaaccggatgcaatctccaaagctggcgaaattatcgaaattatcaacaaagcgggtttcaccatcacgaaactgaaaatgatgatgctgagccgtaaagaagccctggattttcatgtcgaccaccagtctcgcccgtttttcaatgaactgattcaattcatcaccacgggtccgattatcgcaatggaaattctgcgtgatgacgctatctgcgaatggaaacgcctgctgggcccggcaaactcaggtgttgcgcgtaccgatgccagtgaatccattcgcgctctgtttggcaccgatggtatccgtaatgcagcacatggtccggactcattcgcatcggcagctcgtgaaatggaactgtttttcccgagctctggcggttgcggtccggcaaacaccgccaaatttaccaattgtacgtgctgtattgtcaaaccgcacgcagtgtcagaaggcctgctgggtaaaattctgatggcaatccgtgatgctggctttgaaatctcggccatgcagatgttcaacatggaccgcgttaacgtcgaagaattctacgaagtttacaaaggcgtggttaccgaatatcacgatatggttacggaaatgtactccggtccgtgcgtcgcgatggaaattcagcaaaacaatgccaccaaaacgtttcgtgaattctgtggtccggcagatccggaaatcgcacgtcatctgcgtccgggtaccctgcgcgcaatttttggtaaaacgaaaatccagaacgctgtgcactgtaccgatctgccggaagacggtctgctggaagttcaatactttttcaaaattctggataatctcgagcaccaccaccaccaccactga

SEQ ID NO: 827 - protein, 294 aa, Artificial Sequence
  NME7AB
MEKTLALIKPDAISKAGEIIEIINKAGFTITKLKMMMLSRKEALDFHVDHQSRPFFNELIQFITTGPIIAMEILRDDAICEWKRLLGPANSGVARTDASESIRALFGTDGIRNAAHGPDSFASAAREMELFFPSSGGCGPANTAKFTNCTCCIVKPHAVSEGLLGKILMAIRDAGFEISAMQMFNMDRVNVEEFYEVYKGVVTEYHDMVTEMYSGPCVAMEIQQNNATKTFREFCGPADPEIARHLRPGTLRAIFGKTKIQNAVHCTDLPEDGLLEVQYFFKILDNLEHHHHHH

SEQ ID NO: 828 - DNA, 783 bp, Artificial Sequence
  Human NME7 x1
atgatgatgctttcaaggaaagaagcattggattttcatgtagatcaccagtcaagaccctttttcaatgagctgatccagtttattacaactggtcctattattgccatggagattttaagagatgatgctatatgtgaatggaaaagactgctgggacctgcaaactctggagtggcacgcacagatgcttctgaaagcattagagccctctttggaacagatggcataagaaatgcagcgcatggccctgattcttttgcttctgcggccagagaaatggagttgttttttccttcaagtggaggttgtgggccggcaaacactgctaaatttactaattgtacctgttgcattgttaaaccccatgctgtcagtgaaggactgttgggaaagatcctgatggctatccgagatgcaggttttgaaatctcagctatgcagatgttcaatatggatcgggttaatgttgaggaattctatgaagtttataaaggagtagtgaccgaatatcatgacatggtgacagaaatgtattctggcccttgtgtagcaatggagattcaacagaataatgctacaaagacatttcgagaattttgtggacctgctgatcctgaaattgcccggcatttacgccctggaactctcagagcaatctttggtaaaactaagatccagaatgctgttcactgtactgatctgccagaggatggcctattagaggttcaatacttcttcaagatcttggataatctcgagcaccaccaccaccaccactga

SEQ ID NO: 829 - protein, 260 aa, Artificial Sequence
  Human NME7 x1
MMMLSRKEALDFHVDHQSRPFFNELIQFITTGPIIAMEILRDDAICEWKRLLGPANSGVARTDASESIRALFGTDGIRNAAHGPDSFASAAREMELFFPSSGGCGPANTAKFTNCTCCIVKPHAVSEGLLGKILMAIRDAGFEISAMQMFNMDRVNVEEFYEVYKGVVTEYHDMVTEMYSGPCVAMEIQQNNATKTFREFCGPADPEIARHLRPGTLRAIFGKTKIQNAVHCTDLPEDGLLEVQYFFKILDNLEHHHHHH

SEQ ID NO: 830 - DNA, 426 bp, Artificial Sequence
  Mouse Antibody 17H6 Heavy chain: DNA sequence - Signal sequence FR1CDR1FR2CDR2FR3CDR3FR4
atgaagttgtggctgaactggattttccttgtaacacttttaaatggtatccagtgtgaggtgaagctggtggagtctggaggaggcttggtacagcctgggggttctctgagactctcctgtgcaacttctgggttcaccttcactgattactacatgagctgggtccgccagcctccaagaaaggcacttgagtggttgggttttattagaaacaaagctaatggttacacagcagagtacagtgcgtctgtgaagggtcggttcaccatctccagagatgtttcccaaaacctcctctatcttcaaatgaacatcctgagagctgaggacagtgccacttattactgtgcaaaagattactacggtagtaaccctgcctggtttgcttactggggccaagggactctggtcactgtctctgca

SEQ ID NO: 831 - protein, 142 aa, Artificial Sequence
  Mouse Antibody 17H6 Heavy chain: Amino acid sequence - Signal peptideFR1CDR1FR2CDR2FR3CDR3FR4
MKLWLNWIFLVTLLNGIQCEVKLVESGGGLVQPGGSLRLSCATSGFTFTDYYMSWVRQPPRKALEWLGFIRNKANGYTAEYSASVKGRFTISRDVSQNLLYLQMNILRAEDSATYYCAKDYYGSNPAWFAYWGQGTLVTVSA

SEQ ID NO: 832 - DNA, 90 bp, Artificial Sequence
  Mouse 17H6 heavy chain variable framework 1 (FW1) sequence
gaggtgaagctggtggagtctggaggaggcttggtacagcctgggggttctctgagactctcctgtgcaacttctgggttcaccttcact

SEQ ID NO: 833 - protein, 30 aa, Artificial Sequence
  Mouse 17H6 heavy chain variable framework 1 (FW1) sequence
EVKLVESGGGLVQPGGSLRLSCATSGFTFT

SEQ ID NO: 834 - DNA, 15 bp, Artificial Sequence
  Mouse 17H6 heavy chain variable complementarity determining regions 1 (CDR1) sequence
gattactacatgagc

SEQ ID NO: 835 - protein, 5 aa, Artificial Sequence
  Mouse 17H6 heavy chain variable complementarity determining regions 1 (CDR1) sequence
DYYMS

SEQ ID NO: 836 - DNA, 90 bp, Artificial Sequence; identical to SEQ ID NO: 832
  Mouse 17H6 heavy chain variable framework 2 (FW2) sequence

SEQ ID NO: 837 - protein, 14 aa, Artificial Sequence
  Mouse 17H6 heavy chain variable framework 2 (FW2) sequence
WVRQPPRKALEWLG

SEQ ID NO: 838 - DNA, 57 bp, Artificial Sequence
  Mouse 17H6 heavy chain variable complementarity determining regions 2 (CDR2) sequence
tttattagaaacaaagctaatggttacacagcagagtacagtgcgtctgtgaagggt

SEQ ID NO: 839 - protein, 19 aa, Artificial Sequence
  Mouse 17H6 heavy chain variable complementarity determining regions 2 (CDR2) sequence
FIRNKANGYTAEYSASVKG

SEQ ID NO: 840 - DNA, 96 bp, Artificial Sequence
  Mouse 17H6 heavy chain variable framework 3 (FW3) sequence
cggttcaccatctccagagatgtttcccaaaacctcctctatcttcaaatgaacatcctgagagctgaggacagtgccacttattactgtgcaaaa

SEQ ID NO: 841 - protein, 32 aa, Artificial Sequence
  Mouse 17H6 heavy chain variable framework 3 (FW3) sequence
RFTISRDVSQNLLYLQMNILRAEDSATYYCAK

SEQ ID NO: 842 - DNA, 36 bp, Artificial Sequence
  Mouse 17H6 heavy chain variable complementarity determining regions 3 (CDR3) sequence
gattactacggtagtaaccctgcctggtttgcttac

SEQ ID NO: 843 - DNA, 33 bp, Artificial Sequence
  Mouse 17H6 heavy chain variable framework 4 (FW4) sequence
tggggccaagggactctggtcactgtctctgca

SEQ ID NO: 844 - DNA, 393 bp, Artificial Sequence
  Mouse Antibody 17H6 Light chain: DNA sequence - Signal sequence FR1CDR1FR2CDR2FR3CDR3FR4
atgaagttgcctgtgaggctgttggtgctgatgttctggattcctgcttccaacagtgatattttgatgacccagactccactctccctgcctgtcagtcttggagatcaagcctccatctcttgcagatctagtcagagcattgtacatagtagtggaaacacctttttagaatggtacctgcagaaacctggccagtctccaaagctcctgatctacaaagtttccaaccgattttctggggtcccagacaggttcagtggcagtggatcagggatagatttcacactcaagatcagcagagtggaggctgaggatctgggagtttattactgctttcaaggttcacatgttcctttcacgttcggctcggggacaaagttggaaataaaa

SEQ ID NO: 845 - protein, 131 aa, Artificial Sequence
  Mouse Antibody 17H6 Light chain: Amino acid sequence - Signal peptideFR1CDR1FR2CDR2FR3CDR3FR4
MKLPVRLLVLMFWIPASNSDILMTQTPLSLPVSLGDQASISCRSSQSIVHSSGNTFLEWYLQKPGQSPKLLIYKVSNRFSGVPDRFSGSGSGIDFTLKISRVEAEDLGVYYCFQGSHVPFTFGSGTKLEIK

SEQ ID NO: 846 - DNA, 69 bp, Artificial Sequence
  Mouse 17H6 light chain variable framework 1 (FW1) sequence
gatattttgatgacccagactccactctccctgcctgtcagtcttggagatcaagcctccatctcttgc

SEQ ID NO: 847 - protein, 23 aa, Artificial Sequence
  Mouse 17H6 light chain variable framework 1 (FW1) sequence
DILMTQTPLSLPVSLGDQASISC

SEQ ID NO: 848 - DNA, 48 bp, Artificial Sequence
  Mouse 17H6 light chain variable complementarity determining regions 1 (CDR1) sequence
agatctagtcagagcattgtacatagtagtggaaacacctttttagaa

SEQ ID NO: 849 - protein, 16 aa, Artificial Sequence
  Mouse 17H6 light chain variable complementarity determining regions 1 (CDR1) sequence
RSSQSIVHSSGNTFLE

SEQ ID NO: 850 - DNA, 45 bp, Artificial Sequence
  Mouse 17H6 light chain variable framework 2 (FW2) sequence
tggtacctgcagaaacctggccagtctccaaagctcctgatctac

SEQ ID NO: 851 - protein, 15 aa, Artificial Sequence
  Mouse 17H6 light chain variable framework 2 (FW2) sequence
WYLQKPGQSPKLLIY

SEQ ID NO: 852 - DNA, 21 bp, Artificial Sequence
  Mouse 17H6 light chain variable complementarity determining regions 2 (CDR2) sequence
aaagtttccaaccgattttct

SEQ ID NO: 853 - protein, 7 aa, Artificial Sequence
  Mouse 17H6 light chain variable complementarity determining regions 2 (CDR2) sequence
KVSNRFS

SEQ ID NO: 854 - DNA, 96 bp, Artificial Sequence
  Mouse 17H6 light chain variable framework 3 (FW3) sequence
ggggtcccagacaggttcagtggcagtggatcagggatagatttcacactcaagatcagcagagtggaggctgaggatctgggagtttattactgc

SEQ ID NO: 855 - protein, 32 aa, Artificial Sequence
  Mouse 17H6 light chain variable framework 3 (FW3) sequence
GVPDRFSGSGSGIDFTLKISRVEAEDLGVYYC

SEQ ID NO: 856 - DNA, 27 bp, Artificial Sequence
  Mouse 17H6 light chain variable complementarity determining regions 3 (CDR3) sequence
tttcaaggttcacatgttcctttcacg

SEQ ID NO: 857 - protein, 9 aa, Artificial Sequence
  Mouse 17H6 light chain variable complementarity determining regions 3 (CDR3) sequence
FQGSHVPFT

SEQ ID NO: 858 - DNA, 30 bp, Artificial Sequence
  Mouse 17H6 light chain variable framework 4 (FW4) sequence
ttcggctcggggacaaagttggaaataaaa

SEQ ID NO: 859 - protein, 10 aa, Artificial Sequence
  Mouse 17H6 light chain variable framework 4 (FW4) sequence
FGSGTKLEIK

SEQ ID NO: 860 - DNA, 408 bp, Artificial Sequence
  Mouse antibody 39H5 Heavy chain: DNA sequence - Signal sequenceFR1CDR1FR2CDR2FR3CDR3FR4
atggcttgggtgtggaccttgctattcctgatggcagctgcccaaagtgcccaagcacagatccagttggtgcagtctggacctgagctgaagaagcctggagagacagtcaagatctcctgcaaggcttctgggtataccttcacaaactatggaatgaactgggtgaagcaggctccaggaaagggtttaaagtggatgggctggataaacacctacactggagagccaacatatgttggtgacttcaagggacggtttgccttctctttggagacctctgccagcactgcctatttgcagatcaacaacctcaaaaatgaggacacggctacatatttttgtgttagaggtatccacggctacgtggactactggggccaaggcaccactctcacagtctcctca

SEQ ID NO: 861 - protein, 136 aa, Artificial Sequence
  Mouse antibody 39H5 Heavy chain: Amino acid sequence - Signal peptideFR1CDR1FR2CDR2FR3CDR3FR4
MAWVWTLLFLMAAAQSAQAQIQLVQSGPELKKPGETVKISCKASGYTFTNYGMNWVKQAPGKGLKWMGWINTYTGEPTYVGDFKGRFAFSLETSASTAYLQINNLKNEDTATYFCVRGIHGYVDYWGQGTTLTVSS

SEQ ID NO: 862 - DNA, 90 bp, Artificial Sequence
  Mouse antibody 39H5 heavy chain variable framework 1 (FW1) sequence
cagatccagttggtgcagtctggacctgagctgaagaagcctggagagacagtcaagatctcctgcaaggcttctgggtataccttcaca

SEQ ID NO: 863 - protein, 30 aa, Artificial Sequence
  Mouse antibody 39H5 heavy chain variable framework 1 (FW1) sequence
QIQLVQSGPELKKPGETVKISCKASGYTFT

SEQ ID NO: 864 - DNA, 15 bp, Artificial Sequence
  Mouse antibody 39H5 heavy chain variable complementarity determining regions 1 (CDR1) sequence
aactatggaatgaac

SEQ ID NO: 865 - protein, 5 aa, Artificial Sequence
  Mouse antibody 39H5 heavy chain variable complementarity determining regions 1 (CDR1) sequence
NYGMN

SEQ ID NO: 866 - DNA, 42 bp, Artificial Sequence
  Mouse antibody 39H5 heavy chain variable framework 2 (FW2) sequence
tgggtgaagcaggctccaggaaagggtttaaagtggatgggc

SEQ ID NO: 867 - protein, 14 aa, Artificial Sequence
  Mouse antibody 39H5 heavy chain variable framework 2 (FW2) sequence
WVKQAPGKGLKWMG

SEQ ID NO: 868 - DNA, 51 bp, Artificial Sequence
  Mouse antibody 39H5 heavy chain variable complementarity determining regions 2 (CDR2) sequence
tggataaacacctacactggagagccaacatatgttggtgacttcaaggga

SEQ ID NO: 869 - protein, 17 aa, Artificial Sequence
  Mouse antibody 39H5 heavy chain variable complementarity determining regions 2 (CDR2) sequence
WINTYTGEPTYVGDFKG

SEQ ID NO: 870 - DNA, 96 bp, Artificial Sequence
  Mouse antibody 39H5 heavy chain variable framework 3 (FW3) sequence
cggtttgccttctctttggagacctctgccagcactgcctatttgcagatcaacaacctcaaaaatgaggacacggctacatatttttgtgttaga

SEQ ID NO: 871 - protein, 32 aa, Artificial Sequence
  Mouse antibody 39H5 heavy chain variable framework 3 (FW3) sequence
RFAFSLETSASTAYLQINNLKNEDTATYFCVR

SEQ ID NO: 872 - DNA, 24 bp, Artificial Sequence
  Mouse antibody 39H5 heavy chain variable complementarity determining regions 3 (CDR3) sequence
ggtatccacggctacgtggactac

SEQ ID NO: 873 - protein, 8 aa, Artificial Sequence
  Mouse antibody 39H5 heavy chain variable complementarity determining regions 3 (CDR3) sequence
GIHGYVDY

SEQ ID NO: 874 - DNA, 33 bp, Artificial Sequence
  Mouse antibody 39H5 heavy chain variable framework 4 (FW4) sequence
tggggccaaggcaccactctcacagtctcctca

SEQ ID NO: 875 - protein, 11 aa, Artificial Sequence
  Mouse antibody 39H5 heavy chain variable framework 4 (FW4) sequence
WGQGTTLTVSS

SEQ ID NO: 876 - DNA, 393 bp, Artificial Sequence
  Mouse antibody 39H5 Light chain: DNA sequence - Signal sequenceFR1CDR1FR2CDR2FR3CDR3FR4
atgaagttgcctgttaggctgttggtgctgatgttctggattcctgcttccagcagtgatgttttgatgacccaaactccactctccctgcctgtcagtcttggagatcaagcctccatctcttgcagatctagtcagagcattgtacatagaaatggaaacacctatttagaatggtacctgcagaaaccaggccagtctccaaagctcctgatctacaaagtttccaaccgattttctggggtcccagacaggttcagtggcagtggatcagggacagatttcacactcaagatcagcagagtggaggctgaggatctgggagtttattactgctttcaaggttcacatcttccgtggacgttcggtggaggcaccaagctggaaatcaaa

SEQ ID NO: 877 - protein, 131 aa, Artificial Sequence
  Mouse antibody 39H5 Light chain: Amino acid sequence - Signal peptideFR1CDR1FR2CDR2FR3CDR3FR4
MKLPVRLLVLMFWIPASSSDVLMTQTPLSLPVSLGDQASISCRSSQSIVHRNGNTYLEWYLQKPGQSPKLLIYKVSNRFSGVPDRFSGSGSGTDFTLKISRVEAEDLGVYYCFQGSHLPWTFGGGTKLEIK

SEQ ID NO: 878 - DNA, 69 bp, Artificial Sequence; identical to SEQ ID NO: 460
  Mouse antibody 39H5 light chain variable framework 1 (FW1) sequence

SEQ ID NO: 879 - protein, 23 aa, Artificial Sequence
  Mouse antibody 39H5 light chain variable framework 1 (FW1) sequence
DVLMTQTPLSLPVSLGDQASISC

SEQ ID NO: 880 - DNA, 48 bp, Artificial Sequence
  Mouse antibody 39H5 light chain variable complementarity determining regions 1 (CDR1) sequence
agatctagtcagagcattgtacatagaaatggaaacacctatttagaa

SEQ ID NO: 881 - protein, 16 aa, Artificial Sequence
  Mouse antibody 39H5 light chain variable complementarity determining regions 1 (CDR1) sequence
RSSQSIVHRNGNTYLE

SEQ ID NO: 882 - DNA, 45 bp, Artificial Sequence; identical to SEQ ID NO: 464
  Mouse antibody 39H5 light chain variable framework 2 (FW2) sequence

SEQ ID NO: 883 - protein, 15 aa, Artificial Sequence
  Mouse antibody 39H5 light chain variable framework 2 (FW2) sequence
WYLQKPGQSPKLLIY

SEQ ID NO: 884 - DNA, 21 bp, Artificial Sequence
  Mouse antibody 39H5 light chain variable complementarity determining regions 2 (CDR2) sequence
aaagtttccaaccgattttct

SEQ ID NO: 885 - protein, 7 aa, Artificial Sequence
  Mouse antibody 39H5 light chain variable complementarity determining regions 2 (CDR2) sequence
KVSNRFS

SEQ ID NO: 886 - DNA, 96 bp, Artificial Sequence
  Mouse antibody 39H5 light chain variable framework 3 (FW3) sequence
ggggtcccagacaggttcagtggcagtggatcagggacagatttcacactcaagatcagcagagtggaggctgaggatctgggagtttattactgc

SEQ ID NO: 887 - protein, 32 aa, Artificial Sequence
  Mouse antibody 39H5 light chain variable framework 3 (FW3) sequence
GVPDRFSGSGSGTDFTLKISRVEAEDLGVYYC

SEQ ID NO: 888 - DNA, 27 bp, Artificial Sequence
  Mouse antibody 39H5 light chain variable complementarity determining regions 3 (CDR3) sequence
tttcaaggttcacatcttccgtggacg

SEQ ID NO: 889 - protein, 9 aa, Artificial Sequence
  Mouse antibody 39H5 light chain variable complementarity determining regions 3 (CDR3) sequence
FQGSHLPWT

SEQ ID NO: 890 - DNA, 30 bp, Artificial Sequence
  Mouse antibody 39H5 light chain variable framework 4 (FW4) sequence
ttcggtggaggcaccaagctggaaatcaaa

SEQ ID NO: 891 - protein, 10 aa, Artificial Sequence
  Mouse antibody 39H5 light chain variable framework 4 (FW4) sequence
FGGGTKLEIK

SEQ ID NO: 892 - DNA, 411 bp, Artificial Sequence
  Antibody 3C5 Heavy chain: DNA sequence - Signal sequenceFR1CDR1FR2CDR2FR3CDR3FR4
atggcttgggtgtggaccttgctgttcctgatggcagctgcccaaagtgcccaagcacagatccagttggtgcagtctggacctgagctgaagaagcctggagagacagtcaagatctcctgcaaggcttctgggtataccttcacaaactatggaatgaactgggtgaagcaggctccaggaaagggtttaaagtggatgggctggataaacacctacactggaaagccaacatatgctgatgacttcaagggacggtttgccttctctttggagacctctgccagcactgcctatttgcagatcaacaacctcaaaaatgaggacacggctacatatttctgtgcaagagggggactagatggttactacggctactggggccaaggcaccactctcacagtctcctca

SEQ ID NO: 893 - protein, 137 aa, Artificial Sequence
  Antibody 3C5 Heavy chain: Amino acid sequence - Signal peptideFR1CDR1FR2CDR2FR3CDR3FR4
MAWVWTLLFLMAAAQSAQAQIQLVQSGPELKKPGETVKISCKASGYTFTNYGMNWVKQAPGKGLKWMGWINTYTGKPTYADDFKGRFAFSLETSASTAYLQINNLKNEDTATYFCARGGLDGYYGYWGQGTTLTVSS

SEQ ID NO: 894 - DNA, 90 bp, Artificial Sequence; identical to SEQ ID NO: 862
  Mouse antibody 3C5 heavy chain variable framework 1 (FW1) sequence

SEQ ID NO: 895 - protein, 30 aa, Artificial Sequence; identical to SEQ ID NO: 863
  Mouse antibody 3C5 heavy chain variable framework 1 (FW1) sequence

SEQ ID NO: 896 - DNA, 15 bp, Artificial Sequence
  Mouse antibody 3C5 heavy chain variable complementarity determining regions 1 (CDR1) sequence
aactatggaatgaac

SEQ ID NO: 897 - protein, 5 aa, Artificial Sequence
  Mouse antibody 3C5 heavy chain variable complementarity determining regions 1 (CDR1) sequence
NYGMN

SEQ ID NO: 898 - DNA, 42 bp, Artificial Sequence; identical to SEQ ID NO: 866
  Mouse antibody 3C5 heavy chain variable framework 2 (FW2) sequence

SEQ ID NO: 899 - protein, 14 aa, Artificial Sequence
  Mouse antibody 3C5 heavy chain variable framework 2 (FW2) sequence
WVKQAPGKGLKWMG

SEQ ID NO: 900 - DNA, 51 bp, Artificial Sequence
  Mouse antibody 3C5 heavy chain variable complementarity determining regions 2 (CDR2) sequence
tggataaacacctacactggaaagccaacatatgctgatgacttcaaggga

SEQ ID NO: 901 - protein, 17 aa, Artificial Sequence
  Mouse antibody 3C5 heavy chain variable complementarity determining regions 2 (CDR2) sequence
WINTYTGKPTYADDFKG

SEQ ID NO: 902 - DNA, 96 bp, Artificial Sequence
  Mouse antibody 3C5 heavy chain variable framework 3 (FW3) sequence
cggtttgccttctctttggagacctctgccagcactgcctatttgcagatcaacaacctcaaaaatgaggacacggctacatatttctgtgcaaga

SEQ ID NO: 903 - protein, 32 aa, Artificial Sequence
  Mouse antibody 3C5 heavy chain variable framework 3 (FW3) sequence
RFAFSLETSASTAYLQINNLKNEDTATYFCAR

SEQ ID NO: 904 - DNA, 27 bp, Artificial Sequence
  Mouse antibody 3C5 heavy chain variable complementarity determining regions 3 (CDR3) sequence
gggggactagatggttactacggctac

SEQ ID NO: 905 - protein, 9 aa, Artificial Sequence
  Mouse antibody 3C5 heavy chain variable complementarity determining regions 3 (CDR3) sequence
GGLDGYYGY

SEQ ID NO: 906 - DNA, 33 bp, Artificial Sequence; identical to SEQ ID NO: 874
  Mouse antibody 3C5 heavy chain variable framework 4 (FW4) sequence

SEQ ID NO: 907 - protein, 11 aa, Artificial Sequence
  Mouse antibody 3C5 heavy chain variable framework 4 (FW4) sequence
WGQGTTLTVSS

SEQ ID NO: 908 - DNA, 393 bp, Artificial Sequence
  Antibody 3C5 Light chain: DNA sequence (393 bp) - Signal sequenceFR1CDR1FR2CDR2FR3CDR3FR4
atgagtcctgcccagttcctgtttctgctagtgctctcgattcaggaaaccaacggtgatgttgtgatggctcagaccccactcactttgtcggttaccattggacaaccagcctccatctcttgcaaatcaagtcagagcctcttacatagtaaaggaaagacatatttgaattggttattacagaggccaggccagtctccaaagctcctaatctatctggtgtctaaactggaatctggagtccctgacaggttcagtggcagtggatcagggacagatttcacactgaaaatcagcagagtggaggctgaagatttgggagtttattactgcttgcaaactacacattttccgtggacgttcggtggaggcaccaagctggaaatcaaa

SEQ ID NO: 909 - protein, 131 aa, Artificial Sequence
  Antibody 3C5 Light chain: Amino acid sequence (131 aa) - Signal peptideFR1CDR1FR2CDR2FR3CDR3FR4
MSPAQFLFLLVLSIQETNGDVVMAQTPLTLSVTIGQPASISCKSSQSLLHSKGKTYLNWLLQRPGQSPKLLIYLVSKLESGVPDRFSGSGSGTDFTLKISRVEAEDLGVYYCLQTTHFPWTFGGGTKLEIK

SEQ ID NO: 910 - DNA, 69 bp, Artificial Sequence
  Mouse antibody 3C5 light chain variable framework 1 (FW1) sequence
gatgttgtgatggctcagaccccactcactttgtcggttaccattggacaaccagcctccatctcttgc

SEQ ID NO: 911 - protein, 23 aa, Artificial Sequence
  Mouse antibody 3C5 light chain variable framework 1 (FW1) sequence
DVVMAQTPLTLSVTIGQPASISC

SEQ ID NO: 912 - DNA, 48 bp, Artificial Sequence
  Mouse antibody 39H5 light chain variable complementarity determining regions 1 (CDR1) sequence
aaatcaagtcagagcctcttacatagtaaaggaaagacatatttgaat

SEQ ID NO: 913 - protein, 16 aa, Artificial Sequence
  Mouse antibody 39H5 light chain variable complementarity determining regions 1 (CDR1) sequence
KSSQSLLHSKGKTYLN

SEQ ID NO: 914 - DNA, 45 bp, Artificial Sequence
  Mouse antibody 3C5 light chain variable framework 2 (FW2) sequence
tggttattacagaggccaggccagtctccaaagctcctaatctat

SEQ ID NO: 915 - protein, 15 aa, Artificial Sequence
  Mouse antibody 3C5 light chain variable framework 2 (FW2) sequence
WLLQRPGQSPKLLIY

SEQ ID NO: 916 - DNA, 21 bp, Artificial Sequence
  Mouse antibody 3C5 light chain variable complementarity determining regions 2 (CDR2) sequence
ctggtgtctaaactggaatct

SEQ ID NO: 917 - protein, 7 aa, Artificial Sequence
  Mouse antibody 3C5 light chain variable complementarity determining regions 2 (CDR2) sequence
LVSKLES

SEQ ID NO: 918 - DNA, 96 bp, Artificial Sequence
  Mouse antibody 3C5 light chain variable framework 3 (FW3) sequence
ggagtccctgacaggttcagtggcagtggatcagggacagatttcacactgaaaatcagcagagtggaggctgaagatttgggagtttattactgc

SEQ ID NO: 919 - protein, 32 aa, Artificial Sequence; identical to SEQ ID NO: 887
  Mouse antibody 3C5 light chain variable framework 3 (FW3) sequence

SEQ ID NO: 920 - DNA, 27 bp, Artificial Sequence
  Mouse antibody 3C5 light chain variable complementarity determining regions 3 (CDR3) sequence
ttgcaaactacacattttccgtggacg

SEQ ID NO: 921 - protein, 9 aa, Artificial Sequence
  Mouse antibody 3C5 light chain variable complementarity determining regions 3 (CDR3) sequence
LQTTHFPWT

SEQ ID NO: 922 - DNA, 30 bp, Artificial Sequence; identical to SEQ ID NO: 890
  Mouse antibody 3C5 light chain variable framework 4 (FW4) sequence

SEQ ID NO: 923 - protein, 10 aa, Artificial Sequence
  Mouse antibody 3C5 light chain variable framework 4 (FW4) sequence
FGGGTKLEIK

SEQ ID NO: 924 - DNA, 420 bp, Artificial Sequence
  Mouse antibody 8A9 Heavy chain: DNA sequence (420 bp) - Signal sequenceFR1CDR1FR2CDR2FR3CDR3FR4
atgaagttgtggctgaactggattttccttgtaacacttttaaatggtatccagtgtgaggtggagctggtggagtctggaggaggcttggtacagcctgggggttctctgagactctcctgtgcaacttctgggttcaccttcactgatcactacatgagctgggtccgccagcctccaggaaaggcacttgagtggttgggatttattagaaacaaagctaatggttacacaacagagtacagtgcatctgtgaagggtcggttcaccatctccagagataattcccaaagcatcctctatcttcaaatgaaaaccctgagaactgaggacagtgccacttattactgtgcaagaccttctgactgggactcctggtttgcttactggggccaagggactctggtcactgtctctgca

SEQ ID NO: 925 - protein, 140 aa, Artificial Sequence
  Mouse antibody 8A9 Heavy chain: Amino acid sequence (140 aa) - Signal peptideFR1CDR1FR2CDR2FR3CDR3FR4
MKLWLNWIFLVTLLNGIQCEVELVESGGGLVQPGGSLRLSCATSGFTFTDHYMSWVRQPPGKALEWLGFIRNKANGYTTEYSASVKGRFTISRDNSQSILYLQMKTLRTEDSATYYCARPSDWDSWFAYWGQGTLVTVSA

SEQ ID NO: 926 - DNA, 90 bp, Artificial Sequence
  Mouse antibody 8A9 heavy chain variable framework 1 (FW1) sequence
gaggtggagctggtggagtctggaggaggcttggtacagcctgggggttctctgagactctcctgtgcaacttctgggttcaccttcact

SEQ ID NO: 927 - protein, 30 aa, Artificial Sequence
  Mouse antibody 8A9 heavy chain variable framework 1 (FW1) sequence
EVELVESGGGLVQPGGSLRLSCATSGFTFT

SEQ ID NO: 928 - DNA, 15 bp, Artificial Sequence
  Mouse antibody 8A9 heavy chain variable complementarity determining regions 1 (CDR1) sequence
gatcactacatgagc

SEQ ID NO: 929 - protein, 5 aa, Artificial Sequence
  Mouse antibody 8A9 heavy chain variable complementarity determining regions 1 (CDR1) sequence
DHYMS

SEQ ID NO: 930 - DNA, 42 bp, Artificial Sequence
  Mouse antibody 8A9 heavy chain variable framework 2 (FW2) sequence
tgggtccgccagcctccaggaaaggcacttgagtggttggga

SEQ ID NO: 931 - protein, 14 aa, Artificial Sequence
  Mouse antibody 8A9 heavy chain variable framework 2 (FW2) sequence
WVRQPPGKALEWLG

SEQ ID NO: 932 - DNA, 57 bp, Artificial Sequence
  Mouse antibody 8A9 heavy chain variable complementarity determining regions 2 (CDR2) sequence
tttattagaaacaaagctaatggttacacaacagagtacagtgcatctgtgaagggt

SEQ ID NO: 933 - protein, 19 aa, Artificial Sequence
  Mouse antibody 8A9 heavy chain variable complementarity determining regions 2 (CDR2) sequence
FIRNKANGYTTEYSASVKG

SEQ ID NO: 934 - DNA, 96 bp, Artificial Sequence
  Mouse antibody 8A9 heavy chain variable framework 3 (FW3) sequence
cggttcaccatctccagagataattcccaaagcatcctctatcttcaaatgaaaaccctgagaactgaggacagtgccacttattactgtgcaaga

SEQ ID NO: 935 - protein, 32 aa, Artificial Sequence
  Mouse antibody 8A9 heavy chain variable framework 3 (FW3) sequence
RFTISRDNSQSILYLQMKTLRTEDSATYYCAR

SEQ ID NO: 936 - DNA, 30 bp, Artificial Sequence
  Mouse antibody 8A9 heavy chain variable complementarity determining regions 3 (CDR3) sequence
ccttctgactgggactcctggtttgcttac

SEQ ID NO: 937 - protein, 10 aa, Artificial Sequence
  Mouse antibody 8A9 heavy chain variable complementarity determining regions 3 (CDR3) sequence
PSDWDSWFAY

SEQ ID NO: 938 - DNA, 33 bp, Artificial Sequence; identical to SEQ ID NO: 843
  Mouse antibody 8A9 heavy chain variable framework 4 (FW4) sequence

SEQ ID NO: 939 - protein, 11 aa, Artificial Sequence
  Mouse antibody 8A9 heavy chain variable framework 4 (FW4) sequence
WGQGTLVTVSA

SEQ ID NO: 940 - DNA, 393 bp, Artificial Sequence
  Mouse antibody 8A9 Light chain: DNA sequence (393 bp) - Signal sequenceFR1CDR1FR2CDR2FR3CDR3FR4
atgaagttgcctgttaggctgttggtgctgatgttctggattcctgcttccagcagtgatgttttgatgacccaaactccactctccctgcctgtcagtcttggtgatcaagcctccatctcttgcagatctagtcagagcattgtacatagtaatggcaacacctatttagattggtacttgcagaaaccaggccagtctccaaagctcctgatctacagagtttccaaccgattttctggggtcccagacaggttcagtggcagtggatcagggacagatttcacactcaagatcagcagagtggaggctgaggatctgggactttattactgttttcaaggttcacatgttccgtgggcgttcggtggaggcaccaagctggaaatcaaa

SEQ ID NO: 941 - protein, 131 aa, Artificial Sequence
  Mouse antibody 8A9 Light chain: Amino acid sequence (131 aa) - Signal peptideFR1CDR1FR2CDR2FR3CDR3FR4
MKLPVRLLVLMFWIPASSSDVLMTQTPLSLPVSLGDQASISCRSSQSIVHSNGNTYLDWYLQKPGQSPKLLIYRVSNRFSGVPDRFSGSGSGTDFTLKISRVEAEDLGLYYCFQGSHVPWAFGGGTKLEIK

SEQ ID NO: 942 - DNA, 69 bp, Artificial Sequence
  Mouse antibody 8A9 light chain variable framework 1 (FW1) sequence
gatgttttgatgacccaaactccactctccctgcctgtcagtcttggtgatcaagcctccatctcttgc

SEQ ID NO: 943 - protein, 23 aa, Artificial Sequence
  Mouse antibody 8A9 light chain variable framework 1 (FW1) sequence
DVLMTQTPLSLPVSLGDQASISC

SEQ ID NO: 944 - DNA, 48 bp, Artificial Sequence
  Mouse antibody 8A9 light chain variable complementarity determining regions 1 (CDR1) sequence
agatctagtcagagcattgtacatagtaatggcaacacctatttagat

SEQ ID NO: 945 - protein, 16 aa, Artificial Sequence
  Mouse antibody 8A9 light chain variable complementarity determining regions 1 (CDR1) sequence
RSSQSIVHSNGNTYLD

SEQ ID NO: 946 - DNA, 45 bp, Artificial Sequence
  Mouse antibody 8A9 light chain variable framework 2 (FW2) sequence
tggtacttgcagaaaccaggccagtctccaaagctcctgatctac

SEQ ID NO: 947 - protein, 15 aa, Artificial Sequence
  Mouse antibody 8A9 light chain variable framework 2 (FW2) sequence
WYLQKPGQSPKLLIY

SEQ ID NO: 948 - DNA, 21 bp, Artificial Sequence
  Mouse antibody 8A9 light chain variable complementarity determining regions 2 (CDR2) sequence
agagtttccaaccgattttct

SEQ ID NO: 949 - protein, 7 aa, Artificial Sequence
  Mouse antibody 8A9 light chain variable complementarity determining regions 2 (CDR2) sequence
RVSNRFS

SEQ ID NO: 950 - DNA, 96 bp, Artificial Sequence
  Mouse antibody 8A9 light chain variable framework 3 (FW3) sequence
ggggtcccagacaggttcagtggcagtggatcagggacagatttcacactcaagatcagcagagtggaggctgaggatctgggactttattactgt

SEQ ID NO: 951 - protein, 32 aa, Artificial Sequence
  Mouse antibody 8A9 light chain variable framework 3 (FW3) sequence
GVPDRFSGSGSGTDFTLKISRVEAEDLGLYYC

SEQ ID NO: 952 - DNA, 27 bp, Artificial Sequence
  Mouse antibody 8A9 light chain variable complementarity determining regions 3 (CDR3) sequence
tttcaaggttcacatgttccgtgggcg

SEQ ID NO: 953 - protein, 9 aa, Artificial Sequence
  Mouse antibody 8A9 light chain variable complementarity determining regions 3 (CDR3) sequence
FQGSHVPWA

SEQ ID NO: 954 - DNA, 30 bp, Artificial Sequence; identical to SEQ ID NO: 890
  Mouse antibody 8A9 light chain variable framework 4 (FW4) sequence

SEQ ID NO: 955 - protein, 10 aa, Artificial Sequence
  Mouse antibody 8A9 light chain variable framework 4 (FW4) sequence
FGGGTKLEIK

SEQ ID NO: 956 - DNA, 399 bp, Artificial Sequence
  Mouse antibody 18G12 Heavy chain: DNA sequence (399 bp) - Signal sequenceFR1CDR1FR2CDR2FR3CDR3FR4
atgggatggagctatatcatcctctttttggtcgcaacagctacaggtgtccactcccaggtccaactgcagcagtctggggctgaactggtgaagcctggggcttcagtgaagttgtcctgcaaggcttctggctacaccttcaccggctactttttgtactgggtgaagcagaggcctggacaaggccttgagtggattggggggattaatcctgacaatggtggtattgacttcaatgagaagttcaggaacaaggccacactgactgtagacaaatcctccagcacagcctacatgcaactcagcagcctgacatctgaggactctgcggtctattattgtacattactaatagggaactattggggccaaggcaccactctcacagtctcctca

SEQ ID NO: 957 - protein, 133 aa, Artificial Sequence
  Mouse antibody 18G12 Heavy chain: Amino acid sequence (133 aa) - Signal peptideFR1CDR1FR2CDR2FR3CDR3FR4
MGWSYIILFLVATATGVHSQVQLQQSGAELVKPGASVKLSCKASGYTFTGYFLYWVKQRPGQGLEWIGGINPDNGGIDFNEKFRNKATLTVDKSSSTAYMQLSSLTSEDSAVYYCTLLIGNYWGQGTTLTVSS

SEQ ID NO: 958 - DNA, 90 bp, Artificial Sequence
  Mouse antibody 18G12 heavy chain variable framework 1 (FW1) sequence
caggtccaactgcagcagtctggggctgaactggtgaagcctggggcttcagtgaagttgtcctgcaaggcttctggctacaccttcacc

SEQ ID NO: 959 - protein, 30 aa, Artificial Sequence
  Mouse antibody 18G12 heavy chain variable framework 1 (FW1) sequence
QVQLQQSGAELVKPGASVKLSCKASGYTFT

SEQ ID NO: 960 - DNA, 15 bp, Artificial Sequence
  Mouse antibody 39H5 heavy chain variable complementarity determining regions 1 (CDR1) sequence
ggctactttttgtac

SEQ ID NO: 961 - protein, 5 aa, Artificial Sequence
  Mouse antibody 39H5 heavy chain variable complementarity determining regions 1 (CDR1) sequence
GYFLY

SEQ ID NO: 962 - DNA, 42 bp, Artificial Sequence
  Mouse antibody 18G12 heavy chain variable framework 2 (FW2) sequence
tgggtgaagcagaggcctggacaaggccttgagtggattggg

SEQ ID NO: 963 - protein, 14 aa, Artificial Sequence
  Mouse antibody 18G12 heavy chain variable framework 2 (FW2) sequence
WVKQRPGQGLEWIG

SEQ ID NO: 964 - DNA, 51 bp, Artificial Sequence
  Mouse antibody 18G12 heavy chain variable complementarity determining regions 2 (CDR2) sequence
gggattaatcctgacaatggtggtattgacttcaatgagaagttcaggaac

SEQ ID NO: 965 - protein, 17 aa, Artificial Sequence
  Mouse antibody 18G12 heavy chain variable complementarity determining regions 2 (CDR2) sequence
GINPDNGGIDFNEKFRN

SEQ ID NO: 966 - DNA, 96 bp, Artificial Sequence
  Mouse antibody 18G12 heavy chain variable framework 3 (FW3) sequence
aaggccacactgactgtagacaaatcctccagcacagcctacatgcaactcagcagcctgacatctgaggactctgcggtctattattgtacatta

SEQ ID NO: 967 - protein, 32 aa, Artificial Sequence
  Mouse antibody 18G12 heavy chain variable framework 3 (FW3) sequence
KATLTVDKSSSTAYMQLSSLTSEDSAVYYCTL

SEQ ID NO: 968 - DNA, 15 bp, Artificial Sequence
  Mouse antibody 18G12 heavy chain variable complementarity determining regions 3 (CDR3) sequence
ctaatagggaactat

SEQ ID NO: 969 - protein, 5 aa, Artificial Sequence
  Mouse antibody 18G12 heavy chain variable complementarity determining regions 3 (CDR3) sequence
LIGNY

SEQ ID NO: 970 - DNA, 33 bp, Artificial Sequence; identical to SEQ ID NO: 874
  Mouse antibody 18G12 heavy chain variable framework 4 (FW4) sequence

SEQ ID NO: 971 - protein, 11 aa, Artificial Sequence
  Mouse antibody 18G12 heavy chain variable framework 4 (FW4) sequence
WGQGTTLTVSS

SEQ ID NO: 972 - DNA, 393 bp, Artificial Sequence
  Mouse antibody 18G12 Light chain: DNA sequence (393 bp) - Signal sequenceFR1CDR1FR2CDR2FR3CDR3FR4
atgagtcctgcccagttcctgtttctgttagtgctctggattcgggaaaccaatggtgatgttgtgatgacccagactccactcactttgtcggtaaccattggacagccagcctccatctcttgcaagtcaagtcagagcctcttacatagtgatggaaagacatatttgatttggttgttacagaggccaggccagtctccaaagcgcctaatctatctggtgtctaaactggactctggagtccctgacaggttcactggcagtggatcagggacagatttcacactgaaaatcagcagagtggaggctgaggatttgggagtttatttttgctgtcaaggtacacattttccgtggacgttcggtggaggcaccatgctggaaatcaaa

SEQ ID NO: 973 - protein, 131 aa, Artificial Sequence
  Mouse antibody 18G12 Light chain: Amino acid sequence (131 aa) - Signal peptideFR1CDR1FR2CDR2FR3CDR3FR4
MSPAQFLFLLVLWIRETNGDVVMTQTPLTLSVTIGQPASISCKSSQSLLHSDGKTYLIWLLQRPGQSPKRLIYLVSKLDSGVPDRFTGSGSGTDFTLKISRVEAEDLGVYFCCQGTHFPWTFGGGTMLEIK

SEQ ID NO: 974 - DNA, 69 bp, Artificial Sequence
  Mouse antibody 18G12 light chain variable framework 1 (FW1) sequence
gatgttgtgatgacccagactccactcactttgtcggtaaccattggacagccagcctccatctcttgc

SEQ ID NO: 975 - protein, 23 aa, Artificial Sequence
  Mouse antibody 18G12 light chain variable framework 1 (FW1) sequence
DVVMTQTPLTLSVTIGQPASISC

SEQ ID NO: 976 - DNA, 48 bp, Artificial Sequence
  Mouse antibody 18G12 light chain variable complementarity determining regions 1 (CDR1) sequence
aagtcaagtcagagcctcttacatagtgatggaaagacatatttgatt

SEQ ID NO: 977 - protein, 16 aa, Artificial Sequence
  Mouse antibody 18G12 light chain variable complementarity determining regions 1 (CDR1) sequence
KSSQSLLHSDGKTYLI

SEQ ID NO: 978 - DNA, 45 bp, Artificial Sequence
  Mouse antibody 18G12 light chain variable framework 2 (FW2) sequence
tggttgttacagaggccaggccagtctccaaagcgcctaatctat

SEQ ID NO: 979 - protein, 15 aa, Artificial Sequence
  Mouse antibody 18G12 light chain variable framework 2 (FW2) sequence
WLLQRPGQSPKRLIY

SEQ ID NO: 980 - DNA, 21 bp, Artificial Sequence
  Mouse antibody 18G12 light chain variable complementarity determining regions 2 (CDR2) sequence
ctggtgtctaaactggactct

SEQ ID NO: 981 - protein, 7 aa, Artificial Sequence
  Mouse antibody 18G12 light chain variable complementarity determining regions 2 (CDR2) sequence
LVSKLDS

SEQ ID NO: 982 - DNA, 96 bp, Artificial Sequence
  Mouse antibody 18G12 light chain variable framework 3 (FW3) sequence
ggagtccctgacaggttcactggcagtggatcagggacagatttcacactgaaaatcagcagagtggaggctgaggatttgggagtttatttttgc

SEQ ID NO: 983 - protein, 32 aa, Artificial Sequence
  Mouse antibody 18G12 light chain variable framework 3 (FW3) sequence
GVPDRFTGSGSGTDFTLKISRVEAEDLGVYFC

SEQ ID NO: 984 - DNA, 27 bp, Artificial Sequence
  Mouse antibody 18G12 light chain variable complementarity determining regions 3 (CDR3) sequence
tgtcaaggtacacattttccgtggacg

SEQ ID NO: 985 - protein, 9 aa, Artificial Sequence
  Mouse antibody 18G12 light chain variable complementarity determining regions 3 (CDR3) sequence
CQGTHFPWT

SEQ ID NO: 986 - DNA, 30 bp, Artificial Sequence
  Mouse antibody 18G12 light chain variable framework 4 (FW4) sequence
ttcggtggaggcaccatgctggaaatcaaa

SEQ ID NO: 987 - protein, 10 aa, Artificial Sequence
  Mouse antibody 18G12 light chain variable framework 4 (FW4) sequence
FGGGTMLEIK

SEQ ID NO: 988 - DNA, 416 bp, Artificial Sequence
  Mouse antibody 20A10 Heavy chain: DNA sequence (417 bp) - Signal sequenceFR1CDR1FR2CDR2FR3CDR3FR4
atgaacttcgggttcagcttgattttccttgtccttgttttaaaaggtgtccagtgtgaagtgatgctggtggagtctgggggaggcttagtgaagcctggagggtccctgaaactctcctgtcagcctctggattcactttcagtacctatgccatgtcttggattcgccagactccagagaagaggctggagtgggtcgcatccattggtcgtgctggttccacctactattcagacagtgtgaagggccgattcaccatctccagagataatgtccggaacatcctgtacctgcaaatgagcagtctgaggtctgaggacacggccatgtattactgtgctagaggcccgatctacaatgattacgacgagtttgcttactggggccaagggactctggtcactgtctctgca

SEQ ID NO: 989 - protein, 139 aa, Artificial Sequence
  Mouse antibody 20A10 Heavy chain: Amino acid sequence (139 aa) - Signal peptideFR1CDR1FR2CDR2FR3CDR3FR4
MNFGFSLIFLVLVLKGVQCEVMLVESGGGLVKPGGSLKLSCAASGFTFSTYAMSWIRQTPEKRLEWVASIGRAGSTYYSDSVKGRFTISRDNVRNILYLQMSSLRSEDTAMYYCARGPIYNDYDEFAYWGQGTLVTVSA

SEQ ID NO: 990 - DNA, 90 bp, Artificial Sequence
  Mouse antibody 20A10 heavy chain variable framework 1 (FW1) sequence
gaagtgatgctggtggagtctgggggaggcttagtgaagcctggagggtccctgaaactctcctgtgcagcctctggattcactttcagt

SEQ ID NO: 991 - protein, 30 aa, Artificial Sequence
  Mouse antibody 20A10 heavy chain variable framework 1 (FW1) sequence
EVMLVESGGGLVKPGGSLKLSCAASGFTFS

SEQ ID NO: 992 - DNA, 15 bp, Artificial Sequence
  Mouse antibody 20A10 heavy chain variable complementarity determining regions 1 (CDR1) sequence
acctatgccatgtct

SEQ ID NO: 993 - protein, 5 aa, Artificial Sequence
  Mouse antibody 20A10 heavy chain variable complementarity determining regions 1 (CDR1) sequence
TYAMS

SEQ ID NO: 994 - DNA, 42 bp, Artificial Sequence
  Mouse antibody 20A10 heavy chain variable framework 2 (FW2) sequence
tggattcgccagactccagagaagaggctggagtgggtcgca

SEQ ID NO: 995 - protein, 14 aa, Artificial Sequence
  Mouse antibody 20A10 heavy chain variable framework 2 (FW2) sequence
WIRQTPEKRLEWVA

SEQ ID NO: 996 - DNA, 48 bp, Artificial Sequence
  Mouse antibody 20A10 heavy chain variable complementarity determining regions 2 (CDR2) sequence
tccattggtcgtgctggttccacctactattcagacagtgtgaagggc

SEQ ID NO: 997 - protein, 16 aa, Artificial Sequence
  Mouse antibody 20A10 heavy chain variable complementarity determining regions 2 (CDR2) sequence
SIGRAGSTYYSDSVKG

SEQ ID NO: 998 - DNA, 96 bp, Artificial Sequence
  Mouse antibody 20A10 heavy chain variable framework 3 (FW3) sequence
cgattcaccatctccagagataatgtccggaacatcctgtacctgcaaatgagcagtctgaggtctgaggacacggccatgtattactgtgctaga

SEQ ID NO: 999 - protein, 32 aa, Artificial Sequence
  Mouse antibody 20A10 heavy chain variable framework 3 (FW3) sequence
RFTISRDNVRNILYLQMSSLRSEDTAMYYCAR

SEQ ID NO: 1000 - DNA, 36 bp, Artificial Sequence
  Mouse antibody 20A10 heavy chain variable complementarity determining regions 3 (CDR3) sequence
ggcccgatctacaatgattacgacgagtttgcttac

SEQ ID NO: 1001 - protein, 12 aa, Artificial Sequence
  Mouse antibody 20A10 heavy chain variable complementarity determining regions 3 (CDR3) sequence
GPIYNDYDEFAY

SEQ ID NO: 1002 - DNA, 33 bp, Artificial Sequence; identical to SEQ ID NO: 843
  Mouse antibody 20A10 heavy chain variable framework 4 (FW4) sequence

SEQ ID NO: 1003 - protein, 11 aa, Artificial Sequence
  Mouse antibody 20A10 heavy chain variable framework 4 (FW4) sequence
WGQGTLVTVSA

SEQ ID NO: 1004 - DNA, 396 bp, Artificial Sequence
  Mouse antibody 20A10 Light chain: DNA sequence (396 bp) - Signal sequenceFR1CDR1FR2CDR2FR3CDR3FR4
atggaatcacagactcaggtcttcctctccctgctgctctgggtatctggtacctgtgggaacattatgatgacacagtcgccatcatctctggctgtgtctgcaggagaaaaggtcactatgagctgtaagtccagtcaaagtgttttatacagttcaaatcagaagaactatttggcctggtaccagcagaaaccagggcagtctcctaaactgctgatctactgggcatccactagggaatctggtgtccctgatcgcttcacaggcagtggatctgggacagattttactcttaccatcagcagtgtacaagctgaagacctggcagtttattactgtcatcaatacctctcctcgctcacgttcggtgctgggaccaagctggagctgaaa

SEQ ID NO: 1005 - protein, 132 aa, Artificial Sequence
  Mouse antibody 20A10 Light chain: Amino acid sequence (132 aa) - Signal peptideFR1CDR1FR2CDR2FR3CDR3FR4
MESQTQVFLSLLLWVSGTCGNIMMTQSPSSLAVSAGEKVTMSCKSSQSVLYSSNQKNYLAWYQQKPGQSPKLLIYWASTRESGVPDRFTGSGSGTDFTLTISSVQAEDLAVYYCHQYLSSLTFGAGTKLELK

SEQ ID NO: 1006 - DNA, 69 bp, Artificial Sequence
  Mouse antibody 20A10 light chain variable framework 1 (FW1) sequence
aacattatgatgacacagtcgccatcatctctggctgtgtctgcaggagaaaaggtcactatgagctgt

SEQ ID NO: 1007 - protein, 23 aa, Artificial Sequence
  Mouse antibody 20A10 light chain variable framework 1 (FW1) sequence
NIMMTQSPSSLAVSAGEKVTMSC

SEQ ID NO: 1008 - DNA, 51 bp, Artificial Sequence
  Mouse antibody 20A10 light chain variable complementarity determining regions 1 (CDR1) sequence
aagtccagtcaaagtgttttatacagttcaaatcagaagaactatttggcc

SEQ ID NO: 1009 - protein, 17 aa, Artificial Sequence
  Mouse antibody 20A10 light chain variable complementarity determining regions 1 (CDR1) sequence
KSSQSVLYSSNQKNYLA

SEQ ID NO: 1010 - DNA, 45 bp, Artificial Sequence
  Mouse antibody 20A10 light chain variable framework 2 (FW2) sequence
tggtaccagcagaaaccagggcagtctcctaaactgctgatctac

SEQ ID NO: 1011 - protein, 15 aa, Artificial Sequence
  Mouse antibody 20A10 light chain variable framework 2 (FW2) sequence
WYQQKPGQSPKLLIY

SEQ ID NO: 1012 - DNA, 21 bp, Artificial Sequence
  Mouse antibody 20A10 light chain variable complementarity determining regions 2 (CDR2) sequence
tgggcatccactagggaatct

SEQ ID NO: 1013 - protein, 7 aa, Artificial Sequence
  Mouse antibody 20A10 light chain variable complementarity determining regions 2 (CDR2) sequence
WASTRES

SEQ ID NO: 1014 - DNA, 96 bp, Artificial Sequence
  Mouse antibody 20A10 light chain variable framework 3 (FW3) sequence
ggtgtccctgatcgcttcacaggcagtggatctgggacagattttactcttaccatcagcagtgtacaagctgaagacctggcagtttattactgt

SEQ ID NO: 1015 - protein, 32 aa, Artificial Sequence
  Mouse antibody 20A10 light chain variable framework 3 (FW3) sequence
GVPDRFTGSGSGTDFTLTISSVQAEDLAVYYC

SEQ ID NO: 1016 - DNA, 24 bp, Artificial Sequence
  Mouse antibody 20A10 light chain variable complementarity determining regions 3 (CDR3) sequence
catcaatacctctcctcgctcacg

SEQ ID NO: 1017 - protein, 8 aa, Artificial Sequence
  Mouse antibody 20A10 light chain variable complementarity determining regions 3 (CDR3) sequence
HQYLSSLT

SEQ ID NO: 1018 - DNA, 30 bp, Artificial Sequence
  Mouse antibody 20A10 light chain variable framework 4 (FW4) sequence
ttcggtgctgggaccaagctggagctgaaa

SEQ ID NO: 1019 - protein, 10 aa, Artificial Sequence
  Mouse antibody 20A10 light chain variable framework 4 (FW4) sequence
FGAGTKLELK

SEQ ID NO: 1020 - DNA, 413 bp, Artificial Sequence
  Mouse antibody 25E6 Heavy chain: DNA sequence (414 bp) - Signal sequenceFR1CDR1FR2CDR2FR3CDR3FR4
atgaacttcgggctcagcttgattttccttgccctcattttaaaaggtgtccagtgtgaggtgcagctggtggagtctgggggagacttagtgaagcctggagggtccctgaaactctcctgtgcagcctctggtttcactttcagtagttatggaatgtcttgggttcgccagactccagacaagaggctggagtgggtcgcaaccattagtaatggtggtagacacaccttctatccagacagtgtgaaggggcgattcaccatctccagagacaatgccaagaacaccctgtatctgcaaatgagcagtctgaagttgaggacacagccatgtatttatgtgtaagacagactgggacggagggctggtttgcttactggggccaagggactctggtcactgtctctgca

SEQ ID NO: 1021 - protein, 138 aa, Artificial Sequence
  Mouse antibody 25E6 Heavy chain: Amino acid sequence (138 aa) - Signal peptideFR1CDR1FR2CDR2FR3CDR3FR4
MNFGLSLIFLALILKGVQCEVQLVESGGDLVKPGGSLKLSCAASGFTFSSYGMSWVRQTPDKRLEWVATISNGGRHTFYPDSVKGRFTISRDNAKNTLYLQMSSLKSEDTAMYLCVRQTGTEGWFAYWGQGTLVTVSA

SEQ ID NO: 1022 - DNA, 90 bp, Artificial Sequence
  Mouse antibody 25E6 heavy chain variable framework 1 (FW1) sequence
gaggtgcagctggtggagtctgggggagacttagtgaagcctggagggtccctgaaactctcctgtgcagcctctggtttcactttcagt

SEQ ID NO: 1023 - protein, 30 aa, Artificial Sequence
  Mouse antibody 25E6 heavy chain variable framework 1 (FW1) sequence
EVQLVESGGDLVKPGGSLKLSCAASGFTFS

SEQ ID NO: 1024 - DNA, 15 bp, Artificial Sequence
  Mouse antibody 25E6 heavy chain variable complementarity determining regions 1 (CDR1) sequence
agttatggaatgtct

SEQ ID NO: 1025 - protein, 5 aa, Artificial Sequence
  Mouse antibody 25E6 heavy chain variable complementarity determining regions 1 (CDR1) sequence
SYGMS

SEQ ID NO: 1026 - DNA, 42 bp, Artificial Sequence
  Mouse antibody 25E6 heavy chain variable framework 2 (FW2) sequence
tgggttcgccagactccagacaagaggctggagtgggtcgca

SEQ ID NO: 1027 - protein, 14 aa, Artificial Sequence
  Mouse antibody 25E6 heavy chain variable framework 2 (FW2) sequence
WVRQTPDKRLEWVA

SEQ ID NO: 1028 - DNA, 51 bp, Artificial Sequence
  Mouse antibody 25E6 heavy chain variable complementarity determining regions 2 (CDR2) sequence
accattagtaatggtggtagacacaccttctatccagacagtgtgaagggg

SEQ ID NO: 1029 - protein, 17 aa, Artificial Sequence
  Mouse antibody 25E6 heavy chain variable complementarity determining regions 2 (CDR2) sequence
TISNGGRHTFYPDSVKG

SEQ ID NO: 1030 - DNA, 96 bp, Artificial Sequence
  Mouse antibody 25E6 heavy chain variable framework 3 (FW3) sequence
cgattcaccatctccagagacaatgccaagaacaccctgtatctgcaaatgagcagtctgaagtctgaggacacagccatgtatttatgtgtaaga

SEQ ID NO: 1031 - protein, 32 aa, Artificial Sequence
  Mouse antibody 25E6 heavy chain variable framework 3 (FW3) sequence
RFTISRDNAKNTLYLQMSSLKSEDTAMYLCVR

SEQ ID NO: 1032 - DNA, 30 bp, Artificial Sequence
  Mouse antibody 25E6 heavy chain variable complementarity determining regions 3 (CDR3) sequence
cagactgggacggagggctggtttgcttac

SEQ ID NO: 1033 - protein, 10 aa, Artificial Sequence
  Mouse antibody 25E6 heavy chain variable complementarity determining regions 3 (CDR3) sequence
QTGTEGWFAY

SEQ ID NO: 1034 - DNA, 33 bp, Artificial Sequence; identical to SEQ ID NO: 843
  Mouse antibody 25E6 heavy chain variable framework 4 (FW4) sequence

SEQ ID NO: 1035 - protein, 11 aa, Artificial Sequence
  Mouse antibody 25E6 heavy chain variable framework 4 (FW4) sequence
WGQGTLVTVSA

SEQ ID NO: 1036 - DNA, 392 bp, Artificial Sequence
  Mouse antibody 25E6 Light chain: DNA sequence (393 bp) - Signal sequenceFR1CDR1FR2CDR2FR3CDR3FR4
atgagtcctgcccagttcctgtttctgttagtgctctggattcgggaaaccaacggtgatgttgtgatgacccagactccactcactttgtcggttaccattggacaaccagcctccatctcttgcaagtcaagtcagagcctcttagatagtgatggaaagacatatttgaattggttgttacagaggccaggccagtctccaaagcgcctaatctatctggtgtctaaactggactctggagtccctgacaggttcactggcagtggatcagggacagatttcacactgaaaatcagcagagggaggctgaggatttgggagtttattattgctggcaaggtacacattttcctcagacgttcggtggaggcaccaagctggaaatcaaa

SEQ ID NO: 1037 - protein, 131 aa, Artificial Sequence
  Mouse antibody 25E6 Light chain: Amino acid sequence (131 aa) - Signal peptideFR1CDR1FR2CDR2FR3CDR3FR4
MSPAQFLFLLVLWIRETNGDVVMTQTPLTLSVTIGQPASISCKSSQSLLDSDGKTYLNWLLQRPGQSPKRLIYLVSKLDSGVPDRFTGSGSGTDFTLKISRVEAEDLGVYYCWQGTHFPQTFGGGTKLEIK

SEQ ID NO: 1038 - DNA, 69 bp, Artificial Sequence
  Mouse antibody 25E6 light chain variable framework 1 (FW1) sequence
gatgttgtgatgacccagactccactcactttgtcggttaccattggacaaccagcctccatctcttgc

SEQ ID NO: 1039 - protein, 23 aa, Artificial Sequence
  Mouse antibody 25E6 light chain variable framework 1 (FW1) sequence
DVVMTQTPLTLSVTIGQPASISC

SEQ ID NO: 1040 - DNA, 48 bp, Artificial Sequence
  Mouse antibody 25E6 light chain variable complementarity determining regions 1 (CDR1) sequence
aagtcaagtcagagcctcttagatagtgatggaaagacatatttgaat

SEQ ID NO: 1041 - protein, 16 aa, Artificial Sequence
  Mouse antibody 25E6 light chain variable complementarity determining regions 1 (CDR1) sequence
KSSQSLLDSDGKTYLN

SEQ ID NO: 1042 - DNA, 45 bp, Artificial Sequence; identical to SEQ ID NO: 978
  Mouse antibody 25E6 light chain variable framework 2 (FW2) sequence

SEQ ID NO: 1043 - protein, 15 aa, Artificial Sequence
  Mouse antibody 25E6 light chain variable framework 2 (FW2) sequence
WLLQRPGQSPKRLIY

SEQ ID NO: 1044 - DNA, 21 bp, Artificial Sequence
  Mouse antibody 25E6 light chain variable complementarity determining regions 2 (CDR2) sequence
ctggtgtctaaactggactct

SEQ ID NO: 1045 - protein, 7 aa, Artificial Sequence
  Mouse antibody 25E6 light chain variable complementarity determining regions 2 (CDR2) sequence
LVSKLDS

SEQ ID NO: 1046 - DNA, 96 bp, Artificial Sequence
  Mouse antibody 25E6 light chain variable framework 3 (FW3) sequence
ggagtccctgacaggttcactggcagtggatcagggacagatttcacactgaaaatcagcagagtggaggctgaggatttgggagtttattattgc

SEQ ID NO: 1047 - protein, 32 aa, Artificial Sequence
  Mouse antibody 25E6 light chain variable framework 3 (FW3) sequence
GVPDRFTGSGSGTDFTLKISRVEAEDLGVYYC

SEQ ID NO: 1048 - DNA, 27 bp, Artificial Sequence
  Mouse antibody 25E6 light chain variable complementarity determining regions 3 (CDR3) sequence
tggcaaggtacacattttcctcagacg

SEQ ID NO: 1049 - protein, 9 aa, Artificial Sequence
  Mouse antibody 25E6 light chain variable complementarity determining regions 3 (CDR3) sequence
WQGTHFPQT

SEQ ID NO: 1050 - DNA, 30 bp, Artificial Sequence; identical to SEQ ID NO: 890
  Mouse antibody 25E6 light chain variable framework 4 (FW4) sequence

SEQ ID NO: 1051 - protein, 10 aa, Artificial Sequence
  Mouse antibody 25E6 light chain variable framework 4 (FW4) sequence
FGGGTKLEIK

SEQ ID NO: 1052 - DNA, 399 bp, Artificial Sequence
  Mouse antibody 28F9 Heavy chain: DNA sequence (399 bp) - Signal sequenceFR1CDR1FR2CDR2FR3CDR3FR4
atgggatggagctatatcatcctctttttggtagcaacagctacaggtgtccactcccaggtccaactgcagcagcctggggctgaactggtgcagcctggggcttcagtgaagttgtcctgcaaggcttctggctacaccttcaccggctactttttgtactgggtgaagcagaggcctggacatggccttgagtggattgggggaattcatcctagcaatggtgatactgacttcaatgagaagttcaagaacaaggccacactgactgtagacatatcctccagcactgcctacatgcaactcagcagcctgacatctgaggactctgcggtctattattgtacattactaataggggtctactggggccaaggcaccactctcacagtctcctca

SEQ ID NO: 1053 - protein, 133 aa, Artificial Sequence
  Mouse antibody 28F9 Heavy chain: Amino acid sequence (133 aa) - Signal peptideFR1CDR1FR2CDR2FR3CDR3FR4
MGWSYIILFLVATATGVHSQVQLQQPGAELVQPGASVKLSCKASGYTFTGYFLYWVKQRPGHGLEWIGGIHPSNGDTDFNEKFKNKATLTVDISSSTAYMQLSSLTSEDSAVYYCTLLIGVYWGQGTTLTVSS

SEQ ID NO: 1054 - DNA, 90 bp, Artificial Sequence
  Mouse antibody 28F9 heavy chain variable framework 1 (FW1) sequence
caggtccaactgcagcagcctggggctgaactggtgcagcctggggcttcagtgaagttgtcctgcaaggcttctggctacaccttcacc

SEQ ID NO: 1055 - protein, 30 aa, Artificial Sequence
  Mouse antibody 28F9 heavy chain variable framework 1 (FW1) sequence
QVQLQQPGAELVQPGASVKLSCKASGYTFT

SEQ ID NO: 1056 - DNA, 15 bp, Artificial Sequence
  Mouse antibody 28F9 heavy chain variable complementarity determining regions 1 (CDR1) sequence
ggctactttttgtac

SEQ ID NO: 1057 - protein, 5 aa, Artificial Sequence
  Mouse antibody 28F9 heavy chain variable complementarity determining regions 1 (CDR1) sequence
GYFLY

SEQ ID NO: 1058 - DNA, 42 bp, Artificial Sequence
  Mouse antibody 28F9 heavy chain variable framework 2 (FW2) sequence
tgggtgaagcagaggcctggacatggccttgagtggattggg

SEQ ID NO: 1059 - protein, 14 aa, Artificial Sequence
  Mouse antibody 28F9 heavy chain variable framework 2 (FW2) sequence
WVKQRPGHGLEWIG

SEQ ID NO: 1060 - DNA, 51 bp, Artificial Sequence
  Mouse antibody 28F9 heavy chain variable complementarity determining regions 2 (CDR2) sequence
ggaattcatcctagcaatggtgatactgacttcaatgagaagttcaagaac

SEQ ID NO: 1061 - protein, 17 aa, Artificial Sequence
  Mouse antibody 28F9 heavy chain variable complementarity determining regions 2 (CDR2) sequence
GIHPSNGDTDFNEKFKN

SEQ ID NO: 1062 - DNA, 96 bp, Artificial Sequence
  Mouse antibody 28F9 heavy chain variable framework 3 (FW3) sequence
aaggccacactgactgtagacatatcctccagcactgcctacatgcaactcagcagcctgacatctgaggactctgcggtctattattgtacatta

SEQ ID NO: 1063 - protein, 32 aa, Artificial Sequence
  Mouse antibody 28F9 heavy chain variable framework 3 (FW3) sequence
KATLTVDISSSTAYMQLSSLTSEDSAVYYCTL

SEQ ID NO: 1064 - DNA, 15 bp, Artificial Sequence
  Mouse antibody 28F9 heavy chain variable complementarity determining regions 3 (CDR3) sequence
ctaataggggtctac

SEQ ID NO: 1065 - protein, 5 aa, Artificial Sequence
  Mouse antibody 28F9 heavy chain variable complementarity determining regions 3 (CDR3) sequence
LIGVY

SEQ ID NO: 1066 - DNA, 33 bp, Artificial Sequence; identical to SEQ ID NO: 874
  Mouse antibody 28F9 heavy chain variable framework 4 (FW4) sequence

SEQ ID NO: 1067 - protein, 11 aa, Artificial Sequence
  Mouse antibody 28F9 heavy chain variable framework 4 (FW4) sequence
WGQGTTLTVSS

SEQ ID NO: 1068 - DNA, 393 bp, Artificial Sequence
  Mouse antibody 28F9 Light chain: DNA sequence (393 bp) - Signal sequenceFR1CDR1FR2CDR2FR3CDR3FR4
atgagtcctgcccagttcctgtttctgttagtgctctggattcgggaaaccaacggtgatgttgtgatgacccagactccactcactttgtcggttaccattggacaaccagcctccatctcttgcaagtcaagtcagagcctcttacatagtgatggaaagacatatttgatttggttgttacagaggccaggccagtctccaaagcgcctaatctatctggtgtctaaactggactctggagtccctgacaggttcaccggcagtggatcagggacagatttcacactgaaaatcagcagagtggaggctgaggatttgggagtttatttttgctgtcaaggtacacattttccgtggacgttcggtggaggcaccatgctggaaatcaaa

SEQ ID NO: 1069 - protein, 131 aa, Artificial Sequence; identical to SEQ ID NO: 973
  Mouse antibody 28F9 Light chain: Amino acid sequence (131 aa) - Signal peptideFR1CDR1FR2CDR2FR3CDR3FR4

SEQ ID NO: 1070 - DNA, 69 bp, Artificial Sequence; identical to SEQ ID NO: 1038
  Mouse antibody 28F9 light chain variable framework 1 (FW1) sequence

SEQ ID NO: 1071 - protein, 23 aa, Artificial Sequence
  Mouse antibody 28F9 light chain variable framework 1 (FW1) sequence
DVVMTQTPLTLSVTIGQPASISC

SEQ ID NO: 1072 - DNA, 48 bp, Artificial Sequence; identical to SEQ ID NO: 976
  Mouse antibody 28F9 light chain variable complementarity determining regions 1 (CDR1) sequence

SEQ ID NO: 1073 - protein, 16 aa, Artificial Sequence
  Mouse antibody 28F9 light chain variable complementarity determining regions 1 (CDR1) sequence
KSSQSLLHSDGKTYLI

SEQ ID NO: 1074 - DNA, 45 bp, Artificial Sequence; identical to SEQ ID NO: 978
  Mouse antibody 28F9 light chain variable framework 2 (FW2) sequence

SEQ ID NO: 1075 - protein, 15 aa, Artificial Sequence
  Mouse antibody 28F9 light chain variable framework 2 (FW2) sequence
WLLQRPGQSPKRLIY

SEQ ID NO: 1076 - DNA, 21 bp, Artificial Sequence
  Mouse antibody 28F9 light chain variable complementarity determining regions 2 (CDR2) sequence
ctggtgtctaaactggactct

SEQ ID NO: 1077 - protein, 7 aa, Artificial Sequence
  Mouse antibody 28F9 light chain variable complementarity determining regions 2 (CDR2) sequence
LVSKLDS

SEQ ID NO: 1078 - DNA, 96 bp, Artificial Sequence
  Mouse antibody 28F9 light chain variable framework 3 (FW3) sequence
ggagtccctgacaggttcaccggcagtggatcagggacagatttcacactgaaaatcagcagagtggaggctgaggatttgggagtttatttttgc

SEQ ID NO: 1079 - protein, 32 aa, Artificial Sequence; identical to SEQ ID NO: 983
  Mouse antibody 28F9 light chain variable framework 3 (FW3) sequence

SEQ ID NO: 1080 - DNA, 27 bp, Artificial Sequence
  Mouse antibody 28F9 light chain variable complementarity determining regions 3 (CDR3) sequence
tgtcaaggtacacattttccgtggacg

SEQ ID NO: 1081 - protein, 9 aa, Artificial Sequence
  Mouse antibody 28F9 light chain variable complementarity determining regions 3 (CDR3) sequence
CQGTHFPWT

SEQ ID NO: 1082 - DNA, 30 bp, Artificial Sequence; identical to SEQ ID NO: 986
  Mouse antibody 28F9 light chain variable framework 4 (FW4) sequence

SEQ ID NO: 1083 - protein, 10 aa, Artificial Sequence
  Mouse antibody 28F9 light chain variable framework 4 (FW4) sequence
FGGGTMLEIK

SEQ ID NO: 1084 - DNA, 411 bp, Artificial Sequence
  Mouse antibody 18B4 Heavy chain: DNA sequence (411 bp) - Signal sequenceFR1CDR1FR2CDR2FR3CDR3FR4
atgtacttgggactgaactatgtattcatagtttttctcttaaatggtgtccagagtgaagtgaaacttgaggagtctggaggaggcttggtgcaacctgggggatccatgaaactctcttgtgctgcctctggattcacttttaatgacgcctggatggactgggtccgccagtctccagagaaggggcttgagtgggttgctgaaattagaagcacagctaatattcatacaacatactatgctgagtctgtccaagggaggttcaccatctcaagagatgattccaaaagtagtgtctacctgcaaatgaacagcttgagagctgaagacactggcatttattattgtaccccattactctacggatttgcttactggggccaagggactctggtcactgtctctgca

SEQ ID NO: 1085 - protein, 137 aa, Artificial Sequence
  Mouse antibody 18B4 Heavy chain: Amino acid sequence (137 aa) - Signal peptideFR1CDR1FR2CDR2FR3CDR3FR4
MYLGLNYVFIVFLLNGVQSEVKLEESGGGLVQPGGSMKLSCAASGFTFNDAWMDWVRQSPEKGLEWVAEIRSTANIHTTYYAESVQGRFTISRDDSKSSVYLQMNSLRAEDTGIYYCTPLLYGFAYWGQGTLVTVSA

SEQ ID NO: 1086 - DNA, 90 bp, Artificial Sequence
  Mouse antibody 18B4 heavy chain variable framework 1 (FW1) sequence
gaagtgaaacttgaggagtctggaggaggcttggtgcaacctgggggatccatgaaactctcttgtgctgcctctggattcacttttaat

SEQ ID NO: 1087 - protein, 30 aa, Artificial Sequence
  Mouse antibody 18B4 heavy chain variable framework 1 (FW1) sequence
EVKLEESGGGLVQPGGSMKLSCAASGFTFN

SEQ ID NO: 1088 - DNA, 15 bp, Artificial Sequence
  Mouse antibody 18B4 heavy chain variable complementarity determining regions 1 (CDR1) sequence
gacgcctggatggac

SEQ ID NO: 1089 - protein, 5 aa, Artificial Sequence
  Mouse antibody 18B4 heavy chain variable complementarity determining regions 1 (CDR1) sequence
DAWMD

SEQ ID NO: 1090 - DNA, 42 bp, Artificial Sequence
  Mouse antibody 18B4 heavy chain variable framework 2 (FW2) sequence
tgggtccgccagtctccagagaaggggcttgagtgggttgct

SEQ ID NO: 1091 - protein, 14 aa, Artificial Sequence
  Mouse antibody 18B4 heavy chain variable framework 2 (FW2) sequence
WVRQSPEKGLEWVA

SEQ ID NO: 1092 - DNA, 57 bp, Artificial Sequence
  Mouse antibody 18B4 heavy chain variable complementarity determining regions 2 (CDR2) sequence
gaaattagaagcacagctaatattcatacaacatactatgctgagtctgtccaaggg

SEQ ID NO: 1093 - protein, 19 aa, Artificial Sequence
  Mouse antibody 18B4 heavy chain variable complementarity determining regions 2 (CDR2) sequence
EIRSTANIHTTYYAESVQG

SEQ ID NO: 1094 - DNA, 96 bp, Artificial Sequence
  Mouse antibody 18B4 heavy chain variable framework 3 (FW3) sequence
aggttcaccatctcaagagatgattccaaaagtagtgtctacctgcaaatgaacagcttgagagctgaagacactggcatttattattgtacccca

SEQ ID NO: 1095 - protein, 32 aa, Artificial Sequence
  Mouse antibody 18B4 heavy chain variable framework 3 (FW3) sequence
RFTISRDDSKSSVYLQMNSLRAEDTGIYYCTP

SEQ ID NO: 1096 - DNA, 21 bp, Artificial Sequence
  Mouse antibody 18B4 heavy chain variable complementarity determining regions 3 (CDR3) sequence
ttactctacggatttgcttac

SEQ ID NO: 1097 - protein, 7 aa, Artificial Sequence
  Mouse antibody 18B4 heavy chain variable complementarity determining regions 3 (CDR3) sequence
LLYGFAY

SEQ ID NO: 1098 - DNA, 33 bp, Artificial Sequence; identical to SEQ ID NO: 843
  Mouse antibody 18B4 heavy chain variable framework 4 (FW4) sequence

SEQ ID NO: 1099 - protein, 11 aa, Artificial Sequence
  Mouse antibody 18B4 heavy chain variable framework 4 (FW4) sequence
WGQGTLVTVSA

SEQ ID NO: 1100 - DNA, 393 bp, Artificial Sequence
  Mouse antibody 18B4 Light chain: DNA sequence (393 bp) - Signal sequenceFR1CDR1FR2CDR2FR3CDR3FR4
atgaagttgcctgttaggctgttggtgctgatgttctggattcctgcttccagcagtgatgttgtgatgacccaaagtccactctccctgcctgtcagtcttggagatcaagcctccatctcttgcagaactagtcagagccttgtacacagtaatggaaacacctatttacattggcacctgcagaagccaggccagtctccaaaggtcctgatctacaaagtttccagccgattttctggggtcccagacaggttcagtggcagtggatcggggacagatttcacactcaagatcagcagagtggaggctgaggatctgggagtttatttctgctctcaaaatacacatgttccgtacacgttcggaggggggaccaagctggaaataaaa

SEQ ID NO: 1101 - protein, 131 aa, Artificial Sequence
  Mouse antibody 18B4 Light chain: Amino acid sequence (131 aa) - Signal peptideFR1CDR1FR2CDR2FR3CDR3FR4
MKLPVRLLVLMFWIPASSSDVVMTQSPLSLPVSLGDQASISCRTSQSLVHSNGNTYLHWHLQKPGQSPKVLIYKVSSRFSGVPDRFSGSGSGTDFTLKISRVEAEDLGVYFCSQNTHVPYTFGGGTKLEIK

SEQ ID NO: 1102 - DNA, 69 bp, Artificial Sequence
  Mouse antibody 18B4 light chain variable framework 1 (FW1) sequence
gatgttgtgatgacccaaagtccactctccctgcctgtcagtcttggagatcaagcctccatctcttgc

SEQ ID NO: 1103 - protein, 23 aa, Artificial Sequence
  Mouse antibody 18B4 light chain variable framework 1 (FW1) sequence
DVVMTQSPLSLPVSLGDQASISC

SEQ ID NO: 1104 - DNA, 48 bp, Artificial Sequence
  Mouse antibody 18B4 light chain variable complementarity determining regions 1 (CDR1) sequence
agaactagtcagagccttgtacacagtaatggaaacacctatttacat

SEQ ID NO: 1105 - protein, 16 aa, Artificial Sequence
  Mouse antibody 18B4 light chain variable complementarity determining regions 1 (CDR1) sequence
RTSQSLVHSNGNTYLH

SEQ ID NO: 1106 - DNA, 45 bp, Artificial Sequence
  Mouse antibody 18B4 light chain variable framework 2 (FW2) sequence
tggcacctgcagaagccaggccagtctccaaaggtcctgatctac

SEQ ID NO: 1107 - protein, 15 aa, Artificial Sequence
  Mouse antibody 18B4 light chain variable framework 2 (FW2) sequence
WHLQKPGQSPKVLIY

SEQ ID NO: 1108 - DNA, 21 bp, Artificial Sequence
  Mouse antibody 18B4 light chain variable complementarity determining regions 2 (CDR2) sequence
aaagtttccagccgattttct

SEQ ID NO: 1109 - protein, 7 aa, Artificial Sequence
  Mouse antibody 18B4 light chain variable complementarity determining regions 2 (CDR2) sequence
KVSSRFS

SEQ ID NO: 1110 - DNA, 96 bp, Artificial Sequence
  Mouse antibody 18B4 light chain variable framework 3 (FW3) sequence
ggggtcccagacaggttcagtggcagtggatcggggacagatttcacactcaagatcagcagagtggaggctgaggatctgggagtttatttctgc

SEQ ID NO: 1111 - protein, 32 aa, Artificial Sequence
  Mouse antibody 18B4 light chain variable framework 3 (FW3) sequence
GVPDRFSGSGSGTDFTLKISRVEAEDLGVYFC

SEQ ID NO: 1112 - DNA, 27 bp, Artificial Sequence
  Mouse antibody 18B4 light chain variable complementarity determining regions 3 (CDR3) sequence
tctcaaaatacacatgttccgtacacg

SEQ ID NO: 1113 - protein, 9 aa, Artificial Sequence
  Mouse antibody 18B4 light chain variable complementarity determining regions 3 (CDR3) sequence
SQNTHVPYT

SEQ ID NO: 1114 - DNA, 30 bp, Artificial Sequence
  Mouse antibody 18B4 light chain variable framework 4 (FW4) sequence
ttcggaggggggaccaagctggaaataaaa

SEQ ID NO: 1115 - protein, 10 aa, Artificial Sequence
  Mouse antibody 18B4 light chain variable framework 4 (FW4) sequence
FGGGTKLEIK

SEQ ID NO: 1116 - DNA, 408 bp, Artificial Sequence
  Mouse Antibody IE4 Heavy chain: DNA sequence (408 bp) - Signal sequenceFR1CDR1FR2CDR2FR3CDR3FR4
atggaatggccttgtatctttctcttcctcctgtcagtaactgaaggtgtccactcccaggttcagctgcagcagtctggggctgagctggtgaggcctgggtcctcagtgaagatttcctgtaaggcttctggctatgcattcagtacctactggatgaactgggtgaagcagaggcctggacagggtcttgagtggattggacagatttatcctggagatagtgatactaactacaatggaaagttcaagggtaaagccacactgactgcagacaagtcctccaacacagcctacatgcagctcagcagcctaacatctgaggactctgcggtctttttctgtgcaagaggtaaccacgcctctatggactactggggtcaaggaacctcagtcaccgtctcctca

SEQ ID NO: 1117 - protein, 136 aa, Artificial Sequence
  Mouse Antibody IE4 Heavy chain: Amino acid sequence (136 aa) - Signal peptideFR1CDR1FR2CDR2FR3CDR3FR4
MEWPCIFLFLLSVTEGVHSQVQLQQSGAELVRPGSSVKISCKASGYAFSTYWMNWVKQRPGQGLEWIGQIYPGDSDTNYNGKFKGKATLTADKSSNTAYMQLSSLTSEDSAVFFCARGNHASMDYWGQGTSVTVSS

SEQ ID NO: 1118 - DNA, 90 bp, Artificial Sequence
  Mouse Antibody IE4 heavy chain variable framework 1 (FW1) sequence
caggttcagctgcagcagtctggggctgagctggtgaggcctgggtcctcagtgaagatttcctgtaaggcttctggctatgcattcagt

SEQ ID NO: 1119 - protein, 30 aa, Artificial Sequence
  Mouse Antibody IE4 heavy chain variable framework 1 (FW1) sequence
QVQLQQSGAELVRPGSSVKISCKASGYAFS

SEQ ID NO: 1120-1199 - skipped (80 entries)

SEQ ID NO: 1200 - DNA, 15 bp, Artificial Sequence
  Mouse antibody IE4 heavy chain variable complementarity determining regions 1 (CDR1) sequence
acctactggatgaac

SEQ ID NO: 1201 - protein, 5 aa, Artificial Sequence
  Mouse antibody IE4 heavy chain variable complementarity determining regions 1 (CDR1) sequence
TYWMN

SEQ ID NO: 1202 - DNA, 42 bp, Artificial Sequence
  Mouse antibody IE4 heavy chain variable framework 2 (FW2) sequence
tgggtgaagcagaggcctggacagggtcttgagtggattgga

SEQ ID NO: 1203 - protein, 14 aa, Artificial Sequence
  Mouse antibody IE4 heavy chain variable framework 2 (FW2) sequence
WVKQRPGQGLEWIG

SEQ ID NO: 1204 - DNA, 51 bp, Artificial Sequence
  Mouse antibody IE4 heavy chain variable complementarity determining regions 2 (CDR2) sequence
cagatttatcctggagatagtgatactaactacaatggaaagttcaagggt

SEQ ID NO: 1205 - protein, 17 aa, Artificial Sequence
  Mouse antibody IE4 heavy chain variable complementarity determining regions 2 (CDR2) sequence
QIYPGDSDTNYNGKFKG

SEQ ID NO: 1206 - DNA, 96 bp, Artificial Sequence
  Mouse antibody IE4 heavy chain variable framework 3 (FW3) sequence
aaagccacactgactgcagacaagtcctccaacacagcctacatgcagctcagcagcctaacatctgaggactctgcggtctttttctgtgcaaga

SEQ ID NO: 1207 - protein, 32 aa, Artificial Sequence
  Mouse antibody IE4 heavy chain variable framework 3 (FW3) sequence
KATLTADKSSNTAYMQLSSLTSEDSAVFFCAR

SEQ ID NO: 1208 - DNA, 24 bp, Artificial Sequence
  Mouse antibody IE4 heavy chain variable complementarity determining regions 3 (CDR3) sequence
ggtaaccacgcctctatggactac

SEQ ID NO: 1209 - protein, 8 aa, Artificial Sequence
  Mouse antibody IE4 heavy chain variable complementarity determining regions 3 (CDR3) sequence
GNHASMDY

SEQ ID NO: 1210 - DNA, 33 bp, Artificial Sequence
  Mouse antibody IE4 heavy chain variable framework 4 (FW4) sequence
tggggtcaaggaacctcagtcaccgtctcctca

SEQ ID NO: 1211 - protein, 11 aa, Artificial Sequence
  Mouse antibody IE4 heavy chain variable framework 4 (FW4) sequence
WGQGTSVTVSS

SEQ ID NO: 1212 - DNA, 393 bp, Artificial Sequence
  Mouse Antibody IE4 Light chain: DNA sequence (393 bp) - Signal sequenceFR1CDR1FR2CDR2FR3CDR3FR4
atgaagttgcctgttaggctgttggtgctgatgttctggattcctgcttccagcagtgatgttgtgatgacccaaactccactctccctgcctgtcagtcttggagatcaagcctccatctcttgcagatctagtcagagccttgtacacagtaatggaaacacctatttacattggtacctgcagaagccaggccagtctccaaagctcctgatctacaaagtttccaaccgattttctggggtcccagacaggttcagtggcagtggatcagggacagatttcacactcaagatcagcagagtggaggctgaggatctgggagtttatttctgctctcaaaaaacacatgttccgtggacgttcggtggaggcaccaagctggaaatcaaa

SEQ ID NO: 1213 - protein, 131 aa, Artificial Sequence
  Mouse Antibody IE4 Light chain: Amino acid sequence (131 aa) - Signal peptideFR1CDR1FR2CDR2FR3CDR3FR4
MKLPVRLLVLMFWIPASSSDVVMTQTPLSLPVSLGDQASISCRSSQSLVHSNGNTYLHWYLQKPGQSPKLLIYKVSNRFSGVPDRFSGSGSGTDFTLKISRVEAEDLGVYFCSQKTHVPWTFGGGTKLEIK

SEQ ID NO: 1214 - DNA, 69 bp, Artificial Sequence
  Mouse antibody IE4 light chain variable framework 1 (FW1) sequence
gatgttgtgatgacccaaactccactctccctgcctgtcagtcttggagatcaagcctccatctcttgc

SEQ ID NO: 1215 - protein, 23 aa, Artificial Sequence
  Mouse antibody IE4 light chain variable framework 1 (FW1) sequence
DVVMTQTPLSLPVSLGDQASISC

SEQ ID NO: 1216 - DNA, 48 bp, Artificial Sequence
  Mouse antibody IE4 light chain variable complementarity determining regions 1 (CDR1) sequence
agatctagtcagagccttgtacacagtaatggaaacacctatttacat

SEQ ID NO: 1217 - protein, 16 aa, Artificial Sequence
  Mouse antibody IE4 light chain variable complementarity determining regions 1 (CDR1) sequence
RSSQSLVHSNGNTYLH

SEQ ID NO: 1218 - DNA, 45 bp, Artificial Sequence
  Mouse antibody IE4 light chain variable framework 2 (FW2) sequence
tggtacctgcagaagccaggccagtctccaaagctcctgatctac

SEQ ID NO: 1219 - protein, 15 aa, Artificial Sequence
  Mouse antibody IE4 light chain variable framework 2 (FW2) sequence
WYLQKPGQSPKLLIY

SEQ ID NO: 1220 - DNA, 21 bp, Artificial Sequence
  Mouse antibody IE4 light chain variable complementarity determining regions 2 (CDR2) sequence
aaagtttccaaccgattttct

SEQ ID NO: 1221 - protein, 7 aa, Artificial Sequence
  Mouse antibody IE4 light chain variable complementarity determining regions 2 (CDR2) sequence
KVSNRFS

SEQ ID NO: 1222 - DNA, 96 bp, Artificial Sequence
  Mouse antibody IE4 light chain variable framework 3 (FW3) sequence
ggggtcccagacaggttcagtggcagtggatcagggacagatttcacactcaagatcagcagagtggaggctgaggatctgggagtttatttctgc

SEQ ID NO: 1223 - protein, 32 aa, Artificial Sequence; identical to SEQ ID NO: 1111
  Mouse antibody IE4 light chain variable framework 3 (FW3) sequence

SEQ ID NO: 1224 - DNA, 27 bp, Artificial Sequence
  Mouse antibody IE4 light chain variable complementarity determining regions 3 (CDR3) sequence
tctcaaaaaacacatgttccgtggacg

SEQ ID NO: 1225 - protein, 9 aa, Artificial Sequence
  Mouse antibody IE4 light chain variable complementarity determining regions 3 (CDR3) sequence
SQKTHVPWT

SEQ ID NO: 1226 - DNA, 30 bp, Artificial Sequence; identical to SEQ ID NO: 890
  Mouse antibody IE4 light chain variable framework 4 (FW4) sequence

SEQ ID NO: 1227 - protein, 10 aa, Artificial Sequence
  Mouse antibody IE4 light chain variable framework 4 (FW4) sequence
FGGGTKLEIK

SEQ ID NO: 1228 - DNA, 411 bp, Artificial Sequence
  Mouse antibody 29H1 Heavy chain: DNA sequence (411 bp) - Signal sequenceFR1CDR1FR2CDR2FR3CDR3FR4
atgtacttgggactgaactatgtattcatagtttttctcttaaatggtgtccagagtgaagtgaagcttgaggagtctggaggaggcttggtacaacctggaggatccatgaaactctcttgtgctgcctctggattcacttttagtgacgcctggatggactgggtccgccagtctccagagaaggggcttgaatgggttgctgaaattagaagcaaagctactaatcatgcaacatactatgctgagtctgtgaaagggaggttcaccatctcaagagatgattccaaaagtagtgtctacctgcaaatgaacagcttaagagctgaagacactggcatttattactgtacccccctactttacgggtttgcttactggggccaagggactctggtcactgtctctgca

SEQ ID NO: 1229 - protein, 137 aa, Artificial Sequence
  Mouse antibody 29H1 Heavy chain: Amino acid sequence (137 aa) - Signal peptideFR1CDR1FR2CDR2FR3CDR3FR4
MYLGLNYVFIVFLLNGVQSEVKLEESGGGLVQPGGSMKLSCAASGFTFSDAWMDWVRQSPEKGLEWVAEIRSKATNHATYYAESVKGRFTISRDDSKSSVYLQMNSLRAEDTGIYYCTPLLYGFAYWGQGTLVTVSA

SEQ ID NO: 1230 - DNA, 90 bp, Artificial Sequence
  Mouse antibody 29H1 heavy chain variable framework 1 (FW1) sequence
gaagtgaagcttgaggagtctggaggaggcttggtacaacctggaggatccatgaaactctcttgtgctgcctctggattcacttttagt

SEQ ID NO: 1231 - protein, 30 aa, Artificial Sequence
  Mouse antibody 29H1 heavy chain variable framework 1 (FW1) sequence
EVKLEESGGGLVQPGGSMKLSCAASGFTFS

SEQ ID NO: 1232 - DNA, 15 bp, Artificial Sequence
  Mouse antibody 29H1 heavy chain variable complementarity determining regions 1 (CDR1) sequence
gacgcctggatggac

SEQ ID NO: 1233 - protein, 5 aa, Artificial Sequence
  Mouse antibody 29H1 heavy chain variable complementarity determining regions 1 (CDR1) sequence
DAWMD

SEQ ID NO: 1234 - DNA, 42 bp, Artificial Sequence
  Mouse antibody 29H1 heavy chain variable framework 2 (FW2) sequence
tgggtccgccagtctccagagaaggggcttgaatgggttgct

SEQ ID NO: 1235 - protein, 14 aa, Artificial Sequence
  Mouse antibody 29H1 heavy chain variable framework 2 (FW2) sequence
WVRQSPEKGLEWVA

SEQ ID NO: 1236 - DNA, 57 bp, Artificial Sequence
  Mouse antibody 29H1 heavy chain variable complementarity determining regions 2 (CDR2) sequence
gaaattagaagcaaagctactaatcatgcaacatactatgctgagtctgtgaaaggg

SEQ ID NO: 1237 - protein, 19 aa, Artificial Sequence
  Mouse antibody 29H1 heavy chain variable complementarity determining regions 2 (CDR2) sequence
EIRSKATNHATYYAESVKG

SEQ ID NO: 1238 - DNA, 96 bp, Artificial Sequence
  Mouse antibody 29H1 heavy chain variable framework 3 (FW3) sequence
aggttcaccatctcaagagatgattccaaaagtagtgtctacctgcaaatgaacagcttaagagctgaagacactggcatttattactgtaccccc

SEQ ID NO: 1239 - protein, 32 aa, Artificial Sequence; identical to SEQ ID NO: 1095
  Mouse antibody 29H1 heavy chain variable framework 3 (FW3) sequence

SEQ ID NO: 1240 - DNA, 21 bp, Artificial Sequence
  Mouse antibody 29H1 heavy chain variable complementarity determining regions 3 (CDR3) sequence
ctactttacgggtttgcttac

SEQ ID NO: 1241 - protein, 7 aa, Artificial Sequence
  Mouse antibody 29H1 heavy chain variable complementarity determining regions 3 (CDR3) sequence
LLYGFAY

SEQ ID NO: 1242 - DNA, 33 bp, Artificial Sequence; identical to SEQ ID NO: 843
  Mouse antibody 29H1 heavy chain variable framework 4 (FW4) sequence

SEQ ID NO: 1243 - protein, 11 aa, Artificial Sequence
  Mouse antibody 29H1 heavy chain variable framework 4 (FW4) sequence
WGQGTLVTVSA

SEQ ID NO: 1244 - DNA, 393 bp, Artificial Sequence
  Mouse antibody 29H1 Light chain: DNA sequence (393 bp) - Signal sequenceFR1CDR1FR2CDR2FR3CDR3FR4
atgaagttgcctgttaggctgttggtgctgatgttctggattcctgcttccagcagtgatgttgtgatgacccaaactccactctccctgcctgtcagtcttggagatcaagcctccatctcttgcagatctggtcagagccttgtacacagtaatggacacacctatttacattggtacctgcagaagccaggccagtctccaaggctcctgatctacaaagtttccaaccgattttctggggtcccagacaggttcagtggcagtggatcaagggcagatttcacactcaagatcagcagagtggaggctgaggatctgggagtttatttctgctctcaaactacacatgttccgtggacgttcggtggaggcaccaagctggaaatcaaa

SEQ ID NO: 1245 - protein, 131 aa, Artificial Sequence
  Mouse antibody 29H1 Light chain: Amino acid sequence (131 aa) - Signal peptideFR1CDR1FR2CDR2FR3CDR3FR4
MKLPVRLLVLMFWIPASSSDVVMTQTPLSLPVSLGDQASISCRSGQSLVHSNGHTYLHWYLQKPGQSPRLLIYKVSNRFSGVPDRFSGSGSRADFTLKISRVEAEDLGVYFCSQTTHVPWTFGGGTKLEIK

SEQ ID NO: 1246 - DNA, 69 bp, Artificial Sequence; identical to SEQ ID NO: 1214
  Mouse antibody 29H1 light chain variable framework 1 (FW1) sequence

SEQ ID NO: 1247 - protein, 23 aa, Artificial Sequence
  Mouse antibody 29H1 light chain variable framework 1 (FW1) sequence
DVVMTQTPLSLPVSLGDQASISC

SEQ ID NO: 1248 - DNA, 48 bp, Artificial Sequence
  Mouse antibody 29H1 light chain variable complementarity determining regions 1 (CDR1) sequence
agatctggtcagagccttgtacacagtaatggacacacctatttacat

SEQ ID NO: 1249 - protein, 16 aa, Artificial Sequence
  Mouse antibody 29H1 light chain variable complementarity determining regions 1 (CDR1) sequence
RSGQSLVHSNGHTYLH

SEQ ID NO: 1250 - DNA, 45 bp, Artificial Sequence
  Mouse antibody 29H1 light chain variable framework 2 (FW2) sequence
tggtacctgcagaagccaggccagtctccaaggctcctgatctac

SEQ ID NO: 1251 - protein, 15 aa, Artificial Sequence
  Mouse antibody 29H1 light chain variable framework 2 (FW2) sequence
WYLQKPGQSPRLLIY

SEQ ID NO: 1252 - DNA, 21 bp, Artificial Sequence
  Mouse antibody 29H1 light chain variable complementarity determining regions 2 (CDR2) sequence
aaagtttccaaccgattttct

SEQ ID NO: 1253 - protein, 7 aa, Artificial Sequence
  Mouse antibody 29H1 light chain variable complementarity determining regions 2 (CDR2) sequence
KVSNRFS

SEQ ID NO: 1254 - DNA, 96 bp, Artificial Sequence
  Mouse antibody 29H1 light chain variable framework 3 (FW3) sequence
ggggtcccagacaggttcagtggcagtggatcaagggcagatttcacactcaagatcagcagagtggaggctgaggatctgggagtttatttctgc

SEQ ID NO: 1255 - protein, 32 aa, Artificial Sequence
  Mouse antibody 29H1 light chain variable framework 3 (FW3) sequence
GVPDRFSGSGSRADFTLKISRVEAEDLGVYFC

SEQ ID NO: 1256 - DNA, 27 bp, Artificial Sequence
  Mouse antibody 29H1 light chain variable complementarity determining regions 3 (CDR3) sequence
tctcaaactacacatgttccgtggacg

SEQ ID NO: 1257 - protein, 9 aa, Artificial Sequence
  Mouse antibody 29H1 light chain variable complementarity determining regions 3 (CDR3) sequence
SQTTHVPWT

SEQ ID NO: 1258 - DNA, 30 bp, Artificial Sequence; identical to SEQ ID NO: 890
  Mouse antibody 29H1 light chain variable framework 4 (FW4) sequence

SEQ ID NO: 1259 - protein, 10 aa, Artificial Sequence
  Mouse antibody 29H1 light chain variable framework 4 (FW4) sequence
FGGGTKLEIK

SEQ ID NO: 1260 - DNA, 399 bp, Artificial Sequence
  Mouse antibody 31A1 Heavy chain: DNA sequence (399 bp) - Signal sequenceFR1CDR1FR2CDR2FR3CDR3FR4
atggaaaggcactggatctttctcttcctgttttcagtaactgcaggtgtccactcccaggtccagcttcagcagtctggggctgaactggcaaaacctggggcctcagtgaagatgtcctgcaaggcttctggctacacctttactagctactggatgcactgggtaaaacagaggcctggacagggtctggaatggattggatacattaatcctagcactggttatactgagtacaatcagaagttcaaggacaaggccacattgactgcagacaaatcctccagcacagcctacatgcaactgagcagcctgacatctgaggactctgcagtctattactgtgcaagagcctacattgactactggggccaaggcaccactctcacagtctcctca

SEQ ID NO: 1261 - protein, 133 aa, Artificial Sequence
  Mouse antibody 31A1 Heavy chain: Amino acid sequence (133 aa) - Signal peptideFR1CDR1FR2CDR2FR3CDR3FR4
MERHWIFLFLFSVTAGVHSQVQLQQSGAELAKPGASVKMSCKASGYTFTSYWMHWVKQRPGQGLEWIGYINPSTGYTEYNQKFKDKATLTADKSSSTAYMQLSSLTSEDSAVYYCARAYIDYWGQGTTLTVSS

SEQ ID NO: 1262 - DNA, 90 bp, Artificial Sequence
  Mouse antibody 31A1 heavy chain variable framework 1 (FW1) sequence
caggtccagcttcagcagtctggggctgaactggcaaaacctggggcctcagtgaagatgtcctgcaaggcttctggctacacctttact

SEQ ID NO: 1263 - protein, 30 aa, Artificial Sequence
  Mouse antibody 31A1 heavy chain variable framework 1 (FW1) sequence
QVQLQQSGAELAKPGASVKMSCKASGYTFT

SEQ ID NO: 1264 - DNA, 15 bp, Artificial Sequence
  Mouse antibody 31A1 heavy chain variable complementarity determining regions 1 (CDR1) sequence
agctactggatgcac

SEQ ID NO: 1265 - protein, 5 aa, Artificial Sequence
  Mouse antibody 31A1 heavy chain variable complementarity determining regions 1 (CDR1) sequence
SYWMH

SEQ ID NO: 1266 - DNA, 42 bp, Artificial Sequence
  Mouse antibody 31A1 heavy chain variable framework 2 (FW2) sequence
tgggtaaaacagaggcctggacagggtctggaatggattgga

SEQ ID NO: 1267 - protein, 14 aa, Artificial Sequence
  Mouse antibody 31A1 heavy chain variable framework 2 (FW2) sequence
WVKQRPGQGLEWIG

SEQ ID NO: 1268 - DNA, 51 bp, Artificial Sequence
  Mouse antibody 31A1 heavy chain variable complementarity determining regions 2 (CDR2) sequence
tacattaatcctagcactggttatactgagtacaatcagaagttcaaggac

SEQ ID NO: 1269 - protein, 17 aa, Artificial Sequence
  Mouse antibody 31A1 heavy chain variable complementarity determining regions 2 (CDR2) sequence
YINPSTGYTEYNQKFKD

SEQ ID NO: 1270 - DNA, 96 bp, Artificial Sequence
  Mouse antibody 31A1 heavy chain variable framework 3 (FW3) sequence
aaggccacattgactgcagacaaatcctccagcacagcctacatgcaactgagcagcctgacatctgaggactctgcagtctattactgtgcaaga

SEQ ID NO: 1271 - protein, 32 aa, Artificial Sequence
  Mouse antibody 31A1 heavy chain variable framework 3 (FW3) sequence
KATLTADKSSSTAYMQLSSLTSEDSAVYYCAR

SEQ ID NO: 1272 - DNA, 15 bp, Artificial Sequence
  Mouse antibody 31A1 heavy chain variable complementarity determining regions 3 (CDR3) sequence
gcctacattgactac

SEQ ID NO: 1273 - protein, 5 aa, Artificial Sequence
  Mouse antibody 31A1 heavy chain variable complementarity determining regions 3 (CDR3) sequence
AYIDY

SEQ ID NO: 1274 - DNA, 33 bp, Artificial Sequence; identical to SEQ ID NO: 874
  Mouse antibody 31A1 heavy chain variable framework 4 (FW4) sequence

SEQ ID NO: 1275 - protein, 11 aa, Artificial Sequence
  Mouse antibody 31A1 heavy chain variable framework 4 (FW4) sequence
WGQGTTLTVSS

SEQ ID NO: 1276 - DNA, 393 bp, Artificial Sequence
  Mouse antibody 31A1 Light chain: DNA sequence (393 bp) - Signal sequenceFR1CDR1FR2CDR2FR3CDR3FR4
atgaagttgcctgttaggctgttggtgctgatgttctggattcctgcttccagcagtgatgttttgatgacccaaactccactctccctgcctgtcagtcttggagatcaagcctccttctcttgcagatctagtcagagcattgtacatagtaatggaaacacctatttagaatggtacctgcagaaaccaggccagtctccaaagctcctgatctacaaagtttccaaccgattttctggggtcccagacaggttcagtggcagtggatcagggacagatttcacactcaagatcaacagagtggaggctgaggatctgggagtttattactgctttcaagtttcacattttccgtggacgttcggtggaggcaccaagctggaaatcaaa

SEQ ID NO: 1277 - protein, 131 aa, Artificial Sequence
  Mouse antibody 31A1 Light chain: Amino acid sequence (131 aa) - Signal peptideFR1CDR1FR2CDR2FR3CDR3FR4
MKLPVRLLVLMFWIPASSSDVLMTQTPLSLPVSLGDQASFSCRSSQSIVHSNGNTYLEWYLQKPGQSPKLLIYKVSNRFSGVPDRFSGSGSGTDFTLKINRVEAEDLGVYYCFQVSHFPWTFGGGTKLEIK

SEQ ID NO: 1278 - DNA, 69 bp, Artificial Sequence
  Mouse antibody 31A1 light chain variable framework 1 (FW1) sequence
gatgttttgatgacccaaactccactctccctgcctgtcagtcttggagatcaagcctccttctcttgc

SEQ ID NO: 1279 - protein, 23 aa, Artificial Sequence
  Mouse antibody 31A1 light chain variable framework 1 (FW1) sequence
DVLMTQTPLSLPVSLGDQASFSC

SEQ ID NO: 1280 - DNA, 48 bp, Artificial Sequence; identical to SEQ ID NO: 880
  Mouse antibody 31A1 light chain variable complementarity determining regions 1 (CDR1) sequence

SEQ ID NO: 1281 - protein, 16 aa, Artificial Sequence
  Mouse antibody 31A1 light chain variable complementarity determining regions 1 (CDR1) sequence
RSSQSIVHRNGNTYLE

SEQ ID NO: 1282 - DNA, 45 bp, Artificial Sequence; identical to SEQ ID NO: 464
  Mouse antibody 31A1 light chain variable framework 2 (FW2) sequence

SEQ ID NO: 1283 - protein, 15 aa, Artificial Sequence
  Mouse antibody 31A1 light chain variable framework 2 (FW2) sequence
WYLQKPGQSPKLLIY

SEQ ID NO: 1284 - DNA, 21 bp, Artificial Sequence
  Mouse antibody 31A1 light chain variable complementarity determining regions 2 (CDR2) sequence
aaagtttccaaccgattttct

SEQ ID NO: 1285 - protein, 7 aa, Artificial Sequence
  Mouse antibody 31A1 light chain variable complementarity determining regions 2 (CDR2) sequence
KVSNRFS

SEQ ID NO: 1286 - DNA, 96 bp, Artificial Sequence; identical to SEQ ID NO: 468
  Mouse antibody 31A1 light chain variable framework 3 (FW3) sequence

SEQ ID NO: 1287 - protein, 32 aa, Artificial Sequence; identical to SEQ ID NO: 469
  Mouse antibody 31A1 light chain variable framework 3 (FW3) sequence

SEQ ID NO: 1288 - DNA, 27 bp, Artificial Sequence
  Mouse antibody 31A1 light chain variable complementarity determining regions 3 (CDR3) sequence
tttcaagtttcacattttccgtggacg

SEQ ID NO: 1289 - protein, 9 aa, Artificial Sequence
  Mouse antibody 31A1 light chain variable complementarity determining regions 3 (CDR3) sequence
FQVSHFPWT

SEQ ID NO: 1290 - DNA, 30 bp, Artificial Sequence; identical to SEQ ID NO: 890
  Mouse antibody 31A1 light chain variable framework 4 (FW4) sequence

SEQ ID NO: 1291 - protein, 10 aa, Artificial Sequence
  Mouse antibody 31A1 light chain variable framework 4 (FW4) sequence
FGGGTKLEIK

SEQ ID NO: 1292 - DNA, 411 bp, Artificial Sequence
  Mouse antibody 32C1 Heavy chain: DNA sequence (411 bp) - Signal sequenceFR1CDR1FR2CDR2FR3CDR3FR4
atgtacttgggactgaactgtgtattcatagtttttctcttaaaaggtgtccagagtgaagtgaagcttgaggagtctggaggaggcttggtgcaatctggaggatccatgaaactctcctgtgttgcctctggattcactttcagtaattactggatgaactgggtccgccagtctccagagaaggggcttgagtgggttgctgaaattagattgaaatctaataattatgcaatacattatgcggagtctgtgaaggggaggttcaccatctcaagagatgattccaaaagtagtgtctacctgcaaatgaacaacttaagagctgaagacactggcatttattactgtaccagggtcccgggactggatgcttactggggccaagggactctggtcactgtctctgca

SEQ ID NO: 1293 - protein, 137 aa, Artificial Sequence
  Mouse antibody 32C1 Heavy chain: Amino acid sequence (137 aa) - Signal peptideFR1CDR1FR2CDR2FR3CDR3FR4
MYLGLNCVFIVFLLKGVQSEVKLEESGGGLVQSGGSMKLSCVASGFTFSNYWMNWVRQSPEKGLEWVAEIRLKSNNYAIHYAESVKGRFTISRDDSKSSVYLQMNNLRAEDTGIYYCTRVPGLDAYWGQGTLVTVSA

SEQ ID NO: 1294 - DNA, 90 bp, Artificial Sequence
  Mouse antibody 32C1 heavy chain variable framework 1 (FW1) sequence
gaagtgaagcttgaggagtctggaggaggcttggtgcaatctggaggatccatgaaactctcctgtgttgcctctggattcactttcagt

SEQ ID NO: 1295 - protein, 30 aa, Artificial Sequence
  Mouse antibody 32C1 heavy chain variable framework 1 (FW1) sequence
EVKLEESGGGLVQSGGSMKLSCVASGFTFS

SEQ ID NO: 1296 - DNA, 15 bp, Artificial Sequence
  Mouse antibody 32C1 heavy chain variable complementarity determining regions 1 (CDR1) sequence
aattactggatgaac

SEQ ID NO: 1297 - protein, 5 aa, Artificial Sequence
  Mouse antibody 32C1 heavy chain variable complementarity determining regions 1 (CDR1) sequence
NYWMN

SEQ ID NO: 1298 - DNA, 42 bp, Artificial Sequence; identical to SEQ ID NO: 1090
  Mouse antibody 32C1 heavy chain variable framework 2 (FW2) sequence

SEQ ID NO: 1299 - protein, 14 aa, Artificial Sequence
  Mouse antibody 32C1 heavy chain variable framework 2 (FW2) sequence
WVRQSPEKGLEWVA

SEQ ID NO: 1300 - DNA, 57 bp, Artificial Sequence
  Mouse antibody 32C1 heavy chain variable complementarity determining regions 2 (CDR2) sequence
gaaattagattgaaatctaataattatgcaatacattatgcggagtctgtgaagggg

SEQ ID NO: 1301 - protein, 19 aa, Artificial Sequence
  Mouse antibody 32C1 heavy chain variable complementarity determining regions 2 (CDR2) sequence
EIRLKSNNYAIHYAESVKG

SEQ ID NO: 1302 - DNA, 96 bp, Artificial Sequence
  Mouse antibody 32C1 heavy chain variable framework 3 (FW3) sequence
aggttcaccatctcaagagatgattccaaaagtagtgtctacctgcaaatgaacaacttaagagctgaagacactggcatttattactgtaccagg

SEQ ID NO: 1303 - protein, 32 aa, Artificial Sequence
  Mouse antibody 32C1 heavy chain variable framework 3 (FW3) sequence
RFTISRDDSKSSVYLQMNNLRAEDTGIYYCTR

SEQ ID NO: 1304 - DNA, 21 bp, Artificial Sequence
  Mouse antibody 32C1 heavy chain variable complementarity determining regions 3 (CDR3) sequence
gtcccgggactggatgcttac

SEQ ID NO: 1305 - protein, 7 aa, Artificial Sequence
  Mouse antibody 32C1 heavy chain variable complementarity determining regions 3 (CDR3) sequence
VPGLDAY

SEQ ID NO: 1306 - DNA, 33 bp, Artificial Sequence; identical to SEQ ID NO: 843
  Mouse antibody 32C1 heavy chain variable framework 4 (FW4) sequence

SEQ ID NO: 1307 - protein, 11 aa, Artificial Sequence
  Mouse antibody 32C1 heavy chain variable framework 4 (FW4) sequence
WGQGTLVTVSA

SEQ ID NO: 1308 - DNA, 393 bp, Artificial Sequence
  Mouse antibody 32C1 Light chain: DNA sequence (393 bp) - Signal sequenceFR1CDR1FR2CDR2FR3CDR3FR4
atgaagttgcctgttaggctgttggtgctgatgttctggattcctgcttccagcagtgatgttgtgatgacccaaactccactctccctgcctgtcagtcttggagatcaagcctccatctcttgcagatctagtcagagccttgtacacagtaatggaaacacctatttacattggtacctgcagaagccaggccagtctccaaagctcctgatctacaaagtttccaaccgattttctggggtcccagacaggttcagtggcagtggatcagggacagatttcacactcaagatcagcagtgtggaggctgaggatctgggagtttatttctgctctcaaattacacatgttccgtacacgttcggaggggggaccaatctggaaataaaa

SEQ ID NO: 1309 - protein, 131 aa, Artificial Sequence
  Mouse antibody 32C1 Light chain: Amino acid sequence (131 aa) - Signal peptideFR1CDR1FR2CDR2FR3CDR3FR4
MKLPVRLLVLMFWIPASSSDVVMTQTPLSLPVSLGDQASISCRSSQSLVHSNGNTYLHWYLQKPGQSPKLLIYKVSNRFSGVPDRFSGSGSGTDFTLKISSVEAEDLGVYFCSQITHVPYTFGGGTNLEIK

SEQ ID NO: 1310 - DNA, 69 bp, Artificial Sequence; identical to SEQ ID NO: 1214
  Mouse antibody 32C1 light chain variable framework 1 (FW1) sequence

SEQ ID NO: 1311 - protein, 23 aa, Artificial Sequence
  Mouse antibody 32C1 light chain variable framework 1 (FW1) sequence
DVVMTQTPLSLPVSLGDQASISC

SEQ ID NO: 1312 - DNA, 48 bp, Artificial Sequence; identical to SEQ ID NO: 1216
  Mouse antibody 32C1 light chain variable complementarity determining regions 1 (CDR1) sequence

SEQ ID NO: 1313 - protein, 16 aa, Artificial Sequence
  Mouse antibody 32C1 light chain variable complementarity determining regions 1 (CDR1) sequence
RSSQSLVHSNGNTYLH

SEQ ID NO: 1314 - DNA, 45 bp, Artificial Sequence; identical to SEQ ID NO: 1218
  Mouse antibody 32C1 light chain variable framework 2 (FW2) sequence

SEQ ID NO: 1315 - protein, 15 aa, Artificial Sequence
  Mouse antibody 32C1 light chain variable framework 2 (FW2) sequence
WYLQKPGQSPKLLIY

SEQ ID NO: 1316 - DNA, 21 bp, Artificial Sequence
  Mouse antibody 32C1 light chain variable complementarity determining regions 2 (CDR2) sequence
aaagtttccaaccgattttct

SEQ ID NO: 1317 - protein, 7 aa, Artificial Sequence
  Mouse antibody 32C1 light chain variable complementarity determining regions 2 (CDR2) sequence
KVSNRFS

SEQ ID NO: 1318 - DNA, 96 bp, Artificial Sequence
  Mouse antibody 32C1 light chain variable framework 3 (FW3) sequence
ggggtcccagacaggttcagtggcagtggatcagggacagatttcacactcaagatcagcagtgtggaggctgaggatctgggagtttatttctgc

SEQ ID NO: 1319 - protein, 32 aa, Artificial Sequence
  Mouse antibody 32C1 light chain variable framework 3 (FW3) sequence
GVPDRFSGSGSGTDFTLKISSVEAEDLGVYFC

SEQ ID NO: 1320 - DNA, 27 bp, Artificial Sequence
  Mouse antibody 32C1 light chain variable complementarity determining regions 3 (CDR3) sequence
tctcaaattacacatgttccgtacacg

SEQ ID NO: 1321 - protein, 9 aa, Artificial Sequence
  Mouse antibody 32C1 light chain variable complementarity determining regions 3 (CDR3) sequence
SQITHVPYT

SEQ ID NO: 1322 - DNA, 30 bp, Artificial Sequence
  Mouse antibody 32C1 light chain variable framework 4 (FW4) sequence
ttcggaggggggaccaatctggaaataaaa

SEQ ID NO: 1323 - protein, 10 aa, Artificial Sequence
  Mouse antibody 32C1 light chain variable framework 4 (FW4) sequence
FGGGTNLEIK

SEQ ID NO: 1324 - DNA, 423 bp, Artificial Sequence
  Mouse antibody 45C11 Heavy chain: DNA sequence (423 bp) - Signal sequenceFR1CDR1FR2CDR2FR3CDR3FR4
atgaaatgcagctgggttatcttcttcctgatggcagtggttacaggggtcaattcagaggttcagctgcagcagtctggggcagaccttgtgaagccaggggcctcagtcaagttgtcctgcacagcttctggcttcaacattaaagacacctttatgcactgggtgaagcagaggcctgaacagggcctggagtggattggaaggattgatcctgcgaatggtaatactaaatatgacccgaaattccagggcaaggccactataacagcagacacatcctccaacacagcctacctgcagctcagcagcctgacatctgaggacactgccgtctattactgtgctaaaccgtatggtaactacggctattactatgctttggactactggggtcaaggaacctcagtcaccgtctcctca

SEQ ID NO: 1325 - protein, 141 aa, Artificial Sequence
  Mouse antibody 45C11 Heavy chain: Amino acid sequence (141 aa) - Signal peptideFR1CDR1FR2CDR2FR3CDR3FR4
MKCSWVIFFLMAVVTGVNSEVQLQQSGADLVKPGASVKLSCTASGFNIKDTFMHWVKQRPEQGLEWIGRIDPANGNTKYDPKFQGKATITADTSSNTAYLQLSSLTSEDTAVYYCAKPYGNYGYYYALDYWGQGTSVTVSS

SEQ ID NO: 1326 - DNA, 90 bp, Artificial Sequence
  Mouse antibody 45C11 heavy chain variable framework 1 (FW1) sequence
gaggttcagctgcagcagtctggggcagaccttgtgaagccaggggcctcagtcaagttgtcctgcacagcttctggcttcaacattaaa

SEQ ID NO: 1327 - protein, 30 aa, Artificial Sequence
  Mouse antibody 45C11 heavy chain variable framework 1 (FW1) sequence
EVQLQQSGADLVKPGASVKLSCTASGFNIK

SEQ ID NO: 1328 - DNA, 15 bp, Artificial Sequence
  Mouse antibody 45C11 heavy chain variable complementarity determining regions 1 (CDR1) sequence
gacacctttatgcac

SEQ ID NO: 1329 - protein, 5 aa, Artificial Sequence
  Mouse antibody 45C11 heavy chain variable complementarity determining regions 1 (CDR1) sequence
DTFMH

SEQ ID NO: 1330 - DNA, 42 bp, Artificial Sequence
  Mouse antibody 45C11 heavy chain variable framework 2 (FW2) sequence
tgggtgaagcagaggcctgaacagggcctggagtggattgga

SEQ ID NO: 1331 - protein, 14 aa, Artificial Sequence
  Mouse antibody 45C11 heavy chain variable framework 2 (FW2) sequence
WVKQRPEQGLEWIG

SEQ ID NO: 1332 - DNA, 51 bp, Artificial Sequence
  Mouse antibody 45C11 heavy chain variable complementarity determining regions 2 (CDR2) sequence
aggattgatcctgcgaatggtaatactaaatatgacccgaaattccagggc

SEQ ID NO: 1333 - protein, 17 aa, Artificial Sequence
  Mouse antibody 45C11 heavy chain variable complementarity determining regions 2 (CDR2) sequence
RIDPANGNTKYDPKFQG

SEQ ID NO: 1334 - DNA, 96 bp, Artificial Sequence
  Mouse antibody 45C11 heavy chain variable framework 3 (FW3) sequence
aaggccactataacagcagacacatcctccaacacagcctacctgcagctcagcagcctgacatctgaggacactgccgtctattactgtgctaaa

SEQ ID NO: 1335 - protein, 32 aa, Artificial Sequence
  Mouse antibody 45C11 heavy chain variable framework 3 (FW3) sequence
KATITADTSSNTAYLQLSSLTSEDTAVYYCAK

SEQ ID NO: 1336 - DNA, 39 bp, Artificial Sequence
  Mouse antibody 45C11 heavy chain variable complementarity determining regions 3 (CDR3) sequence
ccgtatggtaactacggctattactatgctttggactac

SEQ ID NO: 1337 - protein, 13 aa, Artificial Sequence
  Mouse antibody 45C11 heavy chain variable complementarity determining regions 3 (CDR3) sequence
PYGNYGYYYALDY

SEQ ID NO: 1338 - DNA, 33 bp, Artificial Sequence; identical to SEQ ID NO: 1210
  Mouse antibody 45C11 heavy chain variable framework 4 (FW4) sequence

SEQ ID NO: 1339 - protein, 11 aa, Artificial Sequence
  Mouse antibody 45C11 heavy chain variable framework 4 (FW4) sequence
WGQGTSVTVSS

SEQ ID NO: 1340 - DNA, 381 bp, Artificial Sequence
  Mouse antibody 45C11 Light chain: DNA sequence (381 bp) - Signal sequenceFR1CDR1FR2CDR2FR3CDR3FR4
atgaggttccaggttcaggttctggggctccttctgctctggatatcaggtgcccagtgtgatgtccagataacccagtctccatcttatcttgctgcatctcctggagaaaccattactattaattgcagggcaagtaagagcattagcaaatatttagcctggtatcaagagaaacctgggaaaactaataagcttcttatctactctggatccactttgcaatctggaattccatcaaggttcagtggcagtggatctggtacagatttcactctcaccatcagtagcctggagcctgaagattttgcaatgtattactgtcaacagcataatgaattcccgtggacgttcggtggaggcaccaagctggaaatcaaa

SEQ ID NO: 1341 - protein, 127 aa, Artificial Sequence
  Mouse antibody 45C11 Light chain: Amino acid sequence (127 aa) - Signal peptideFR1CDR1FR2CDR2FR3CDR3FR4
MRFQVQVLGLLLLWISGAQCDVQITQSPSYLAASPGETITINCRASKSISKYLAWYQEKPGKTNKLLIYSGSTLQSGIPSRFSGSGSGTDFTLTISSLEPEDFAMYYCQQHNEFPWTFGGGTKLEIK

SEQ ID NO: 1342 - DNA, 69 bp, Artificial Sequence
  Mouse antibody 45C11 light chain variable framework 1 (FW1) sequence
gatgtccagataacccagtctccatcttatcttgctgcatctcctggagaaaccattactattaattgc

SEQ ID NO: 1343 - protein, 23 aa, Artificial Sequence
  Mouse antibody 45C11 light chain variable framework 1 (FW1) sequence
DVQITQSPSYLAASPGETITINC

SEQ ID NO: 1344 - DNA, 33 bp, Artificial Sequence
  Mouse antibody 45C11 light chain variable complementarity determining regions 1 (CDR1) sequence
agggcaagtaagagcattagcaaatatttagcc

SEQ ID NO: 1345 - protein, 11 aa, Artificial Sequence
  Mouse antibody 45C11 light chain variable complementarity determining regions 1 (CDR1) sequence
RASKSISKYLA

SEQ ID NO: 1346 - DNA, 45 bp, Artificial Sequence
  Mouse antibody 45C11 light chain variable framework 2 (FW2) sequence
tggtatcaagagaaacctgggaaaactaataagcttcttatctac

SEQ ID NO: 1347 - protein, 15 aa, Artificial Sequence
  Mouse antibody 45C11 light chain variable framework 2 (FW2) sequence
WYQEKPGKTNKLLIY

SEQ ID NO: 1348 - DNA, 21 bp, Artificial Sequence
  Mouse antibody 45C11 light chain variable complementarity determining regions 2 (CDR2) sequence
tctggatccactttgcaatct

SEQ ID NO: 1349 - protein, 7 aa, Artificial Sequence
  Mouse antibody 45C11 light chain variable complementarity determining regions 2 (CDR2) sequence
SGSTLQS

SEQ ID NO: 1350 - DNA, 96 bp, Artificial Sequence
  Mouse antibody 45C11 light chain variable framework 3 (FW3) sequence
ggaattccatcaaggttcagtggcagtggatctggtacagatttcactctcaccatcagtagcctggagcctgaagattttgcaatgtattactgt

SEQ ID NO: 1351 - protein, 32 aa, Artificial Sequence
  Mouse antibody 45C11 light chain variable framework 3 (FW3) sequence
GIPSRFSGSGSGTDFTLTISSLEPEDFAMYYC

SEQ ID NO: 1352 - DNA, 27 bp, Artificial Sequence
  Mouse antibody 45C11 light chain variable complementarity determining regions 3 (CDR3) sequence
caacagcataatgaattcccgtggacg

SEQ ID NO: 1353 - protein, 9 aa, Artificial Sequence
  Mouse antibody 45C11 light chain variable complementarity determining regions 3 (CDR3) sequence
QQHNEFPWT

SEQ ID NO: 1354 - DNA, 30 bp, Artificial Sequence; identical to SEQ ID NO: 890
  Mouse antibody 45C11 light chain variable framework 4 (FW4) sequence

SEQ ID NO: 1355 - protein, 10 aa, Artificial Sequence
  Mouse antibody 45C11 light chain variable framework 4 (FW4) sequence
FGGGTKLEIK

SEQ ID NO: 1356 - DNA, 90 bp, Artificial Sequence; identical to SEQ ID NO: 990
  Mouse 5C6F3 heavy chain variable framework 1 (FW1) sequence

SEQ ID NO: 1357 - protein, 30 aa, Artificial Sequence; identical to SEQ ID NO: 991
  Mouse 5C6F3 heavy chain variable framework 1 (FW1) sequence

SEQ ID NO: 1358 - DNA, 15 bp, Artificial Sequence
  Mouse 5C6F3 heavy chain variable complementarity determining regions 1 (CDR1) sequence
acctatgccatgtct

SEQ ID NO: 1359 - protein, 5 aa, Artificial Sequence
  Mouse 5C6F3 heavy chain variable complementarity determining regions 1 (CDR1) sequence
TYAMS

SEQ ID NO: 1360 - DNA, 42 bp, Artificial Sequence; identical to SEQ ID NO: 124
  Mouse 5C6F3 heavy chain variable framework 2 (FW2) sequence

SEQ ID NO: 1361 - protein, 14 aa, Artificial Sequence
  Mouse 5C6F3 heavy chain variable framework 2 (FW2) sequence
WVRQTPEKRLEWVA

SEQ ID NO: 1362 - DNA, 51 bp, Artificial Sequence
  Mouse 5C6F3 heavy chain variable complementarity determining regions 2 (CDR2) sequence
gccattagtaatggtggtggttacacctactatccagacagtctgaagggg

SEQ ID NO: 1363 - protein, 17 aa, Artificial Sequence
  Mouse 5C6F3 heavy chain variable complementarity determining regions 2 (CDR2) sequence
AISNGGGYTYYPDSLKG

SEQ ID NO: 1364 - DNA, 96 bp, Artificial Sequence
  Mouse 5C6F3 heavy chain variable framework 3 (FW3) sequence
cgattcaccatctccagagacaatgccaagaacaccctgtacctgcaaatgagcagtctgaggtctgaggacacggccacgtattactgtgcaaga

SEQ ID NO: 1365 - protein, 32 aa, Artificial Sequence
  Mouse 5C6F3 heavy chain variable framework 3 (FW3) sequence
RFTISRDNAKNTLYLQMSSLRSEDTATYYCAR

SEQ ID NO: 1366 - DNA, 27 bp, Artificial Sequence
  Mouse 5C6F3 heavy chain variable complementarity determining regions 3 (CDR3) sequence
cgttactatgatcactactttgactac

SEQ ID NO: 1367 - protein, 9 aa, Artificial Sequence
  Mouse 5C6F3 heavy chain variable complementarity determining regions 3 (CDR3) sequence
RYYDHYFDY

SEQ ID NO: 1368 - DNA, 33 bp, Artificial Sequence
  Mouse 5C6F3 heavy chain variable framework 4 (FW4) sequence
tggggccaaggcaccgctctcacggtctcctca

SEQ ID NO: 1369 - protein, 11 aa, Artificial Sequence
  Mouse 5C6F3 heavy chain variable framework 4 (FW4) sequence
WGQGTALTVSS

SEQ ID NO: 1370 - DNA, 69 bp, Artificial Sequence; identical to SEQ ID NO: 460
  Mouse 5C6F3 light chain variable framework 1 (FR1) sequence

SEQ ID NO: 1371 - protein, 23 aa, Artificial Sequence
  Mouse 5C6F3 light chain variable framework 1 (FR1) sequence
DVLMTQTPLSLPVSLGDQASISC

SEQ ID NO: 1372 - DNA, 48 bp, Artificial Sequence; identical to SEQ ID NO: 462
  Mouse 5C6F3 light chain variable complementarity determining regions 1 (CDR1) sequence

SEQ ID NO: 1373 - protein, 16 aa, Artificial Sequence
  Mouse 5C6F3 light chain variable complementarity determining regions 1 (CDR1) sequence
RSSQTIVHSNGNTYLE

SEQ ID NO: 1374 - DNA, 45 bp, Artificial Sequence; identical to SEQ ID NO: 464
  Mouse 5C6F3 light chain variable framework 2 (FR2) sequence

SEQ ID NO: 1375 - protein, 15 aa, Artificial Sequence
  Mouse 5C6F3 light chain variable framework 2 (FR2) sequence
WYLQKPGQSPKLLIY

SEQ ID NO: 1376 - DNA, 21 bp, Artificial Sequence
  Mouse 5C6F3 light chain variable complementarity determining regions 2 (CDR2) sequence
aaagtttccaaccgattttct

SEQ ID NO: 1377 - protein, 7 aa, Artificial Sequence
  Mouse 5C6F3 light chain variable complementarity determining regions 2 (CDR2) sequence
KVSNRFS

SEQ ID NO: 1378 - DNA, 96 bp, Artificial Sequence
  Mouse 5C6F3 light chain variable framework 3 (FR3) sequence
ggggtcccagacaggttcagtggcagtggatcagggacagatttcacactcaagatcagcagggtggaggctgaggatctgggagtttattactgc

SEQ ID NO: 1379 - protein, 32 aa, Artificial Sequence; identical to SEQ ID NO: 887
  Mouse 5C6F3 light chain variable framework 3 (FR3) sequence

SEQ ID NO: 1380 - DNA, 27 bp, Artificial Sequence
  Mouse 5C6F3 light chain variable complementarity determining regions 3 (CDR3) sequence
tttcaagattcacatgttcctctcacg

SEQ ID NO: 1381 - protein, 9 aa, Artificial Sequence
  Mouse 5C6F3 light chain variable complementarity determining regions 3 (CDR3) sequence
FQDSHVPLT

SEQ ID NO: 1382 - DNA, 30 bp, Artificial Sequence; identical to SEQ ID NO: 1018
  Mouse 5C6F3 light chain variable framework 4 (FR4) sequence

SEQ ID NO: 1383 - protein, 10 aa, Artificial Sequence
  Mouse 5C6F3 light chain variable framework 4 (FR4) sequence
FGAGTKLELK

SEQ ID NO: 1384 - DNA, 735 bp, Artificial Sequence
  mu5C6F3 scFv sequence
gaagtgatgctggtggagtctgggggaggcttagtgaagcctggagggtccctgaaactctcctgtgcagcctctggattcactttcagtacctatgccatgtcttgggttcgccagactccggagaagaggctggagtgggtcgcagccattagtaatggtggtggttacacctactatccagacagtctgaaggggcgattcaccatctccagagacaatgccaagaacaccctgtacctgcaaatgagcagtctgaggtctgaggacacggccacgtattactgtgcaagacgttactatgatcactactttgactactggggccaaggcaccgctctcacggtctcctcaggtggcggaggatctggcggaggtggaagcggcggaggcggatccgatgttttgatgacccaaactccactctccctgcctgtcagtcttggagatcaagcctccatctcttgcagatctagtcagaccattgtacatagtaatggaaacacctatttagaatggtacctgcagaaaccaggccagtctccaaagctcctgatctacaaagtttccaaccgattttctggggtcccagacaggttcagtggcagtggatcagggacagatttcacactcaagatcagcagggtggaggctgaggatctgggagtttattactgctttcaagattcacatgttcctctcacgttcggtgctgggaccaagctggagctgaaa

SEQ ID NO: 1385 - protein, 245 aa, Artificial Sequence
  mu5C6F3 scFv sequence
EVMLVESGGGLVKPGGSLKLSCAASGFTFSTYAMSWVRQTPEKRLEWVAAISNGGGYTYYPDSLKGRFTISRDNAKNTLYLQMSSLRSEDTATYYCARRYYDHYFDYWGQGTALTVSSGGGGSGGGGSGGGGSDVLMTQTPLSLPVSLGDQASISCRSSQTIVHSNGNTYLEWYLQKPGQSPKLLIYKVSNRFSGVPDRFSGSGSGTDFTLKISRVEAEDLGVYYCFQDSHVPLTFGAGTKLELK

SEQ ID NO: 1386 - DNA, 90 bp, Artificial Sequence
  Mouse 3C2B1 heavy chain variable framework 1 (CDR1) sequence
gaagtgatgctggtggagtctgggggaggcttagtgaagcctggagggtccctgaaactctcctgtgcagcctctggaatcactttcagt

SEQ ID NO: 1387 - protein, 30 aa, Artificial Sequence
  Mouse 3C2B1 heavy chain variable framework 1 (CDR1) sequence
EVMLVESGGGLVKPGGSLKLSCAASGITFS

SEQ ID NO: 1388 - DNA, 15 bp, Artificial Sequence
  Mouse 3C2B1 heavy chain variable complementarity determining regions 1 (CDR1) sequence
acctataccatgtcg

SEQ ID NO: 1389 - protein, 5 aa, Artificial Sequence
  Mouse 3C2B1 heavy chain variable complementarity determining regions 1 (CDR1) sequence
TYTMS

SEQ ID NO: 1390 - DNA, 42 bp, Artificial Sequence; identical to SEQ ID NO: 124
  Mouse 3C2B1 heavy chain variable framework 2 (CDR2) sequence

SEQ ID NO: 1391 - protein, 14 aa, Artificial Sequence
  Mouse 3C2B1 heavy chain variable framework 2 (CDR2) sequence
WVRQTPEKRLEWVA

SEQ ID NO: 1392 - DNA, 51 bp, Artificial Sequence
  Mouse 3C2B1 heavy chain variable complementarity determining regions 2 (CDR2) sequence
accattagtactggtggtgataaaacctactattcagacagtgtgaagggt

SEQ ID NO: 1393 - protein, 17 aa, Artificial Sequence
  Mouse 3C2B1 heavy chain variable complementarity determining regions 2 (CDR2) sequence
TISTGGDKTYYSDSVKG

SEQ ID NO: 1394 - DNA, 96 bp, Artificial Sequence
  Mouse 3C2B1 heavy chain variable framework 3 (CDR3) sequence
cgattcaccatctccagagacaatgccaagaacaacctgtacctccaaatgagcagtctgaggtctgaggacacggccttgtattactgtgcaagg

SEQ ID NO: 1395 - protein, 32 aa, Artificial Sequence
  Mouse 3C2B1 heavy chain variable framework 3 (CDR3) sequence
RFTISRDNAKNNLYLQMSSLRSEDTALYYCAR

SEQ ID NO: 1396 - DNA, 36 bp, Artificial Sequence
  Mouse 3C2B1 heavy chain variable complementarity determining regions 3 (CDR3) sequence
ggaaccacggctatgtattactatgctatggactac

SEQ ID NO: 1397 - protein, 12 aa, Artificial Sequence
  Mouse 3C2B1 heavy chain variable complementarity determining regions 3 (CDR3) sequence
GTTAMYYYAMDY

SEQ ID NO: 1398 - DNA, 33 bp, Artificial Sequence; identical to SEQ ID NO: 1210
  Mouse 3C2B1 heavy chain variable framework 4 (CDR4) sequence

SEQ ID NO: 1399 - protein, 11 aa, Artificial Sequence
  Mouse 3C2B1 heavy chain variable framework 4 (CDR4) sequence
WGQGTSVTVSS

SEQ ID NO: 1400 - DNA, 69 bp, Artificial Sequence
  Mouse 3C2B1 light chain variable framework 1 (FW1) sequence
gacattgtgctgacacagtctcctgcttccttagctgtatctctggggcagagggccaccatctcatgc

SEQ ID NO: 1401 - protein, 23 aa, Artificial Sequence
  Mouse 3C2B1 light chain variable framework 1 (FW1) sequence
DIVLTQSPASLAVSLGQRATISC

SEQ ID NO: 1402 - DNA, 45 bp, Artificial Sequence
  Mouse 3C2B1 light chain variable complementarity determining regions 1 (CDR1) sequence
agggccagcaaaagtatcagtacatctgactataattatattcac

SEQ ID NO: 1403 - protein, 15 aa, Artificial Sequence
  Mouse 3C2B1 light chain variable complementarity determining regions 1 (CDR1) sequence
RASKSISTSDYNYIH

SEQ ID NO: 1404 - DNA, 45 bp, Artificial Sequence
  Mouse 3C2B1 light chain variable framework 2 (FW2) sequence
tggtaccaacagaaaccaggacagccacccaaactcctcatctat

SEQ ID NO: 1405 - protein, 15 aa, Artificial Sequence
  Mouse 3C2B1 light chain variable framework 2 (FW2) sequence
WYQQKPGQPPKLLIY

SEQ ID NO: 1406 - DNA, 21 bp, Artificial Sequence
  Mouse 3C2B1 light chain variable complementarity determining regions 2 (CDR2) sequence
cttgcatccaacctagaatct

SEQ ID NO: 1407 - protein, 7 aa, Artificial Sequence
  Mouse 3C2B1 light chain variable complementarity determining regions 2 (CDR2) sequence
LASNLES

SEQ ID NO: 1408 - DNA, 95 bp, Artificial Sequence
  Mouse 3C2B1 light chain variable framework 3 (FW3) sequence
gggtccctgccaggttcagtggcagtgggtctgggacagacttcaccctcaacatccatcctgtggaggaagaagatgctgcaacctattactgt

SEQ ID NO: 1409 - protein, 32 aa, Artificial Sequence; identical to SEQ ID NO: 179
  Mouse 3C2B1 light chain variable framework 3 (FW3) sequence

SEQ ID NO: 1410 - DNA, 27 bp, Artificial Sequence
  Mouse 3C2B1 light chain variable complementarity determining regions 3 (CDR3) sequence
cagcacagtagggagcttcctctcacg

SEQ ID NO: 1411 - protein, 9 aa, Artificial Sequence
  Mouse 3C2B1 light chain variable complementarity determining regions 3 (CDR3) sequence
QHSRELPLT

SEQ ID NO: 1412 - DNA, 30 bp, Artificial Sequence; identical to SEQ ID NO: 1018
  Mouse 3C2B1 light chain variable framework 4 (FW4) sequence

SEQ ID NO: 1413 - protein, 10 aa, Artificial Sequence
  Mouse 3C2B1 light chain variable framework 4 (FW4) sequence
FGAGTKLELK

SEQ ID NO: 1414 - DNA, 90 bp, Artificial Sequence
  Mouse B12 heavy chain variable framework 1 (FW1) sequence
caggcgcagctgaaggagtcaggacctggcctggtggcgccctcacagagcctgtccatcacttgcactgtctctgggttttcattaacc

SEQ ID NO: 1415 - protein, 30 aa, Artificial Sequence
  Mouse B12 heavy chain variable framework 1 (FW1) sequence
QAQLKESGPGLVAPSQSLSITCTVSGFSLT

SEQ ID NO: 1416 - DNA, 15 bp, Artificial Sequence
  Mouse B12 heavy chain variable complementarity determining regions 1 (CDR1) sequence
agctatggtgtacac

SEQ ID NO: 1417 - protein, 5 aa, Artificial Sequence
  Mouse B12 heavy chain variable complementarity determining regions 1 (CDR1) sequence
SYGVH

SEQ ID NO: 1418 - DNA, 42 bp, Artificial Sequence
  Mouse B12 heavy chain variable framework 2 (FW2) sequence
tgggttcgccagcctccaggaaagggtctggagtggctggga

SEQ ID NO: 1419 - protein, 14 aa, Artificial Sequence
  Mouse B12 heavy chain variable framework 2 (FW2) sequence
WVRQPPGKGLEWLG

SEQ ID NO: 1420 - DNA, 54 bp, Artificial Sequence
  Mouse B12 heavy chain variable complementarity determining regions 2 (CDR2) sequence
gtaatatggcctggtggaagcacaaattataattcgactctcatgtccagaatg

SEQ ID NO: 1421 - protein, 18 aa, Artificial Sequence
  Mouse B12 heavy chain variable complementarity determining regions 2 (CDR2) sequence
VIWPGGSTNYNSTLMSRM

SEQ ID NO: 1422 - DNA, 90 bp, Artificial Sequence
  Mouse B12 heavy chain variable framework 3 (FW3) sequence
cggatcatcaaagacaactccaagagccaagttttcttaaaaatgaacagtctgcaaattgatgacacagccatgtactactgtgccaga

SEQ ID NO: 1423 - protein, 30 aa, Artificial Sequence
  Mouse B12 heavy chain variable framework 3 (FW3) sequence
RIIKDNSKSQVFLKMNSLQIDDTAMYYCAR

SEQ ID NO: 1424 - DNA, 36 bp, Artificial Sequence
  Mouse B12 heavy chain variable complementarity determining regions 3 (CDR3) sequence
gatcggacacctcgggtgggggcctggtttgcttac

SEQ ID NO: 1425 - protein, 12 aa, Artificial Sequence
  Mouse B12 heavy chain variable complementarity determining regions 3 (CDR3) sequence
DRTPRVGAWFAY

SEQ ID NO: 1426 - DNA, 34 bp, Artificial Sequence
  Mouse B12 heavy chain variable framework 4 (FW4) sequence
tggggccaagggactctggtcactgtctctgcag

SEQ ID NO: 1427 - protein, 11 aa, Artificial Sequence
  Mouse B12 heavy chain variable framework 4 (FW4) sequence
WGQGTLVTVSA

SEQ ID NO: 1428 - DNA, 69 bp, Artificial Sequence
  Mouse B12 light chain variable framework 1 (FR1) sequence
atcattgtgctgacccaatctccagcttctttggctgtgtctctagggcagagggccaccatatcctgc

SEQ ID NO: 1429 - protein, 23 aa, Artificial Sequence
  Mouse B12 light chain variable framework 1 (FR1) sequence
IIVLTQSPASLAVSLGQRATISC

SEQ ID NO: 1430 - DNA, 45 bp, Artificial Sequence
  Mouse B12 light chain variable complementarity determining regions 1 (CDR1) sequence
agagccagtgagagtgttgctacttatggcaataattttatgcag

SEQ ID NO: 1431 - protein, 15 aa, Artificial Sequence
  Mouse B12 light chain variable complementarity determining regions 1 (CDR1) sequence
RASESVATYGNNFMQ

SEQ ID NO: 1432 - DNA, 90 bp, Artificial Sequence
  Mouse B2 heavy chain variable framework 1 (FW1) sequence
gaagtggtgctggtggagtctgggggaggcttagtggagcctggagggtccctgaaactctcctgtgtagcctctggattcgctttcagt

SEQ ID NO: 1433 - protein, 30 aa, Artificial Sequence
  Mouse B2 heavy chain variable framework 1 (FW1) sequence
EVVLVESGGGLVEPGGSLKLSCVASGFAFS

SEQ ID NO: 1434 - DNA, 15 bp, Artificial Sequence
  Mouse B2 heavy chain variable complementarity determining regions 1 (CDR1) sequence
acctttgccatgtct

SEQ ID NO: 1435 - protein, 5 aa, Artificial Sequence
  Mouse B2 heavy chain variable complementarity determining regions 1 (CDR1) sequence
TFAMS

SEQ ID NO: 1436 - DNA, 42 bp, Artificial Sequence
  Mouse B2 heavy chain variable framework 2 (FW2) sequence
tggattcgccagactccggagaagaggctggagtgggtcgca

SEQ ID NO: 1437 - protein, 14 aa, Artificial Sequence
  Mouse B2 heavy chain variable framework 2 (FW2) sequence
WIRQTPEKRLEWVA

SEQ ID NO: 1438 - DNA, 51 bp, Artificial Sequence
  Mouse B2 heavy chain variable complementarity determining regions 2 (CDR2) sequence
gccattagtaatggtggtggttacacctactatccagacactctgaagggg

SEQ ID NO: 1439 - protein, 17 aa, Artificial Sequence
  Mouse B2 heavy chain variable complementarity determining regions 2 (CDR2) sequence
AISNGGGYTYYPDTLKG

SEQ ID NO: 1440 - DNA, 96 bp, Artificial Sequence
  Mouse B2 heavy chain variable framework 3 (FW3) sequence
cgattctccatctccagagacaatgccaagaataccctgtacctgcaaatgagtagtctgaggtctgaggacacggccgtgtattactgtgcaaga

SEQ ID NO: 1441 - protein, 32 aa, Artificial Sequence
  Mouse B2 heavy chain variable framework 3 (FW3) sequence
RFSISRDNAKNTLYLQMSSLRSEDTAVYYCAR

SEQ ID NO: 1442 - DNA, 27 bp, Artificial Sequence
  Mouse B2 heavy chain variable complementarity determining regions 3 (CDR3) sequence
cgctactatgatctctactttgactta

SEQ ID NO: 1443 - protein, 9 aa, Artificial Sequence
  Mouse B2 heavy chain variable complementarity determining regions 3 (CDR3) sequence
RYYDLYFDL

SEQ ID NO: 1444 - DNA, 33 bp, Artificial Sequence
  Mouse B2 heavy chain variable framework 4 (FW4) sequence
tggggccgaggcacctctctcatagtctcctca

SEQ ID NO: 1445 - protein, 11 aa, Artificial Sequence
  Mouse B2 heavy chain variable framework 4 (FW4) sequence
WGRGTSLIVSS

SEQ ID NO: 1446 - DNA, 69 bp, Artificial Sequence
  Mouse B2 light chain variable framework 1 (FR1) sequence
gatattctgatgacccaaactccactctccctgcctgtcagtcttggagatcaagcctccatttcttgc

SEQ ID NO: 1447 - protein, 23 aa, Artificial Sequence
  Mouse B2 light chain variable framework 1 (FR1) sequence
DILMTQTPLSLPVSLGDQASISC

SEQ ID NO: 1448 - DNA, 48 bp, Artificial Sequence
  Mouse B2 light chain variable complementarity determining regions 1 (CDR1) sequence
agatctagtcagaacattgtacatagtaatggaaacacctatttagaa

SEQ ID NO: 1449 - protein, 16 aa, Artificial Sequence
  Mouse B2 light chain variable complementarity determining regions 1 (CDR1) sequence
RSSQNIVHSNGNTYLE

SEQ ID NO: 1450 - DNA, 45 bp, Artificial Sequence; identical to SEQ ID NO: 464
  Mouse B2 light chain variable framework 2 (FR2) sequence

SEQ ID NO: 1451 - protein, 15 aa, Artificial Sequence
  Mouse B2 light chain variable framework 2 (FR2) sequence
WYLQKPGQSPKLLIY

SEQ ID NO: 1452 - DNA, 21 bp, Artificial Sequence
  Mouse B2 light chain variable complementarity determining regions 2 (CDR2) sequence
aaagtttccaaccgattttct

SEQ ID NO: 1453 - protein, 7 aa, Artificial Sequence
  Mouse B2 light chain variable complementarity determining regions 2 (CDR2) sequence
KVSNRFS

SEQ ID NO: 1454 - DNA, 96 bp, Artificial Sequence
  Mouse B2 light chain variable framework 3 (FR3) sequence
ggggtccccgacaggttcagtggtagtgggtcagggacagatttcacactcaagatcagcagagtggaggctgaggatctgggagtttattactgc

SEQ ID NO: 1455 - protein, 32 aa, Artificial Sequence; identical to SEQ ID NO: 887
  Mouse B2 light chain variable framework 3 (FR3) sequence

SEQ ID NO: 1456 - DNA, 27 bp, Artificial Sequence
  Mouse B2 light chain variable complementarity determining regions 3 (CDR3) sequence
tttcaagattcacatgttcctctcacg

SEQ ID NO: 1457 - protein, 9 aa, Artificial Sequence
  Mouse B2 light chain variable complementarity determining regions 3 (CDR3) sequence
FQDSHVPLT

SEQ ID NO: 1458 - DNA, 30 bp, Artificial Sequence
  Mouse B2 light chain variable framework 4 (FR4) sequence
ttcggtgctgggaccaggctggagctgaaa

SEQ ID NO: 1459 - protein, 10 aa, Artificial Sequence
  Mouse B2 light chain variable framework 4 (FR4) sequence
FGAGTRLELK

SEQ ID NO: 1460 - DNA, 90 bp, Artificial Sequence
  Mouse B7 heavy chain variable framework 1 (FW1) sequence
gaggtgcaggtggtggagtctgggggagacttagtgaagcctggagggtccctgaaactctcctgtgcagcctctggattcactttcagt

SEQ ID NO: 1461 - protein, 30 aa, Artificial Sequence
  Mouse B7 heavy chain variable framework 1 (FW1) sequence
EVQVVESGGDLVKPGGSLKLSCAASGFTFS

SEQ ID NO: 1462 - DNA, 15 bp, Artificial Sequence
  Mouse B7 heavy chain variable complementarity determining regions 1 (CDR1) sequence
agatatggcatgtct

SEQ ID NO: 1463 - protein, 5 aa, Artificial Sequence
  Mouse B7 heavy chain variable complementarity determining regions 1 (CDR1) sequence
RYGMS

SEQ ID NO: 1464 - DNA, 42 bp, Artificial Sequence; identical to SEQ ID NO: 1026
  Mouse B7 heavy chain variable framework 2 (FW2) sequence

SEQ ID NO: 1465 - protein, 14 aa, Artificial Sequence
  Mouse B7 heavy chain variable framework 2 (FW2) sequence
WVRQTPDKRLEWVA

SEQ ID NO: 1466 - DNA, 51 bp, Artificial Sequence
  Mouse B7 heavy chain variable complementarity determining regions 2 (CDR2) sequence
accattagtagtggtggtacttacatctactatccagacagtgtgaagggg

SEQ ID NO: 1467 - protein, 17 aa, Artificial Sequence
  Mouse B7 heavy chain variable complementarity determining regions 2 (CDR2) sequence
TISSGGTYIYYPDSVKG

SEQ ID NO: 1468 - DNA, 96 bp, Artificial Sequence
  Mouse B7 heavy chain variable framework 3 (FW3) sequence
cgattcaccatctccagagacaatgccaagaacaccctgtacctgcaaatgagcagtctgaagtctgaggacacagccatgtattactgtgcaagg

SEQ ID NO: 1469 - protein, 32 aa, Artificial Sequence
  Mouse B7 heavy chain variable framework 3 (FW3) sequence
RFTISRDNAKNTLYLQMSSLKSEDTAMYYCAR

SEQ ID NO: 1470 - DNA, 39 bp, Artificial Sequence
  Mouse B7 heavy chain variable complementarity determining regions 3 (CDR3) sequence
gataactacggtagtagctacgactatgctatggactac

SEQ ID NO: 1471 - protein, 13 aa, Artificial Sequence
  Mouse B7 heavy chain variable complementarity determining regions 3 (CDR3) sequence
DNYGSSYDYAMDY

SEQ ID NO: 1472 - DNA, 33 bp, Artificial Sequence; identical to SEQ ID NO: 1210
  Mouse B7 heavy chain variable framework 4 (FW4) sequence

SEQ ID NO: 1473 - protein, 11 aa, Artificial Sequence
  Mouse B7 heavy chain variable framework 4 (FW4) sequence
WGQGTSVTVSS

SEQ ID NO: 1474 - DNA, 69 bp, Artificial Sequence; identical to SEQ ID NO: 460
  Mouse B7 light chain variable framework 1 (FR1) sequence

SEQ ID NO: 1475 - protein, 23 aa, Artificial Sequence
  Mouse B7 light chain variable framework 1 (FR1) sequence
DVLMTQTPLSLPVSLGDQASISC

SEQ ID NO: 1476 - DNA, 48 bp, Artificial Sequence; identical to SEQ ID NO: 462
  Mouse B7 light chain variable complementarity determining regions 1 (CDR1) sequence

SEQ ID NO: 1477 - protein, 16 aa, Artificial Sequence
  Mouse B7 light chain variable complementarity determining regions 1 (CDR1) sequence
RSSQTIVHSNGNTYLE

SEQ ID NO: 1478 - DNA, 45 bp, Artificial Sequence
  Mouse B7 light chain variable framework 2 (FR2) sequence
tggtacctgcaaaaaccaggccagtctccaaagctcctgatctac

SEQ ID NO: 1479 - protein, 15 aa, Artificial Sequence
  Mouse B7 light chain variable framework 2 (FR2) sequence
WYLQKPGQSPKLLIY

SEQ ID NO: 1480 - DNA, 21 bp, Artificial Sequence
  Mouse B7 light chain variable complementarity determining regions 2 (CDR2) sequence
aaagtttccaaccgattttct

SEQ ID NO: 1481 - protein, 7 aa, Artificial Sequence
  Mouse B7 light chain variable complementarity determining regions 2 (CDR2) sequence
KVSNRFS

SEQ ID NO: 1482 - DNA, 96 bp, Artificial Sequence; identical to SEQ ID NO: 1378
  Mouse B7 light chain variable framework 3 (FR3) sequence

SEQ ID NO: 1483 - protein, 32 aa, Artificial Sequence; identical to SEQ ID NO: 887
  Mouse B7 light chain variable framework 3 (FR3) sequence

SEQ ID NO: 1484 - DNA, 27 bp, Artificial Sequence
  Mouse B7 light chain variable complementarity determining regions 3 (CDR3) sequence
tttcaagattcacatgttcctctcacg

SEQ ID NO: 1485 - protein, 9 aa, Artificial Sequence
  Mouse B7 light chain variable complementarity determining regions 3 (CDR3) sequence
FQDSHVPLT

SEQ ID NO: 1486 - DNA, 30 bp, Artificial Sequence; identical to SEQ ID NO: 1018
  Mouse B7 light chain variable framework 4 (FR4) sequence

SEQ ID NO: 1487 - protein, 10 aa, Artificial Sequence
  Mouse B7 light chain variable framework 4 (FR4) sequence
FGAGTKLELK

SEQ ID NO: 1488 - DNA, 90 bp, Artificial Sequence; identical to SEQ ID NO: 990
  Mouse 8C7F3 heavy chain variable framework 1 (FW1) sequence

SEQ ID NO: 1489 - protein, 30 aa, Artificial Sequence; identical to SEQ ID NO: 991
  Mouse 8C7F3 heavy chain variable framework 1 (FW1) sequence

SEQ ID NO: 1490 - DNA, 15 bp, Artificial Sequence
  Mouse 8C7F3 heavy chain variable complementarity determining regions 1 (CDR1) sequence
acctatgccatgtct

SEQ ID NO: 1491 - protein, 5 aa, Artificial Sequence
  Mouse 8C7F3 heavy chain variable complementarity determining regions 1 (CDR1) sequence
TYAMS

SEQ ID NO: 1492 - DNA, 42 bp, Artificial Sequence; identical to SEQ ID NO: 124
  Mouse 8C7F3 heavy chain variable framework 2 (FW2) sequence

SEQ ID NO: 1493 - protein, 14 aa, Artificial Sequence
  Mouse 8C7F3 heavy chain variable framework 2 (FW2) sequence
WVRQTPEKRLEWVA

SEQ ID NO: 1494 - DNA, 51 bp, Artificial Sequence; identical to SEQ ID NO: 1362
  Mouse 8C7F3 heavy chain variable complementarity determining regions 2 (CDR2) sequence

SEQ ID NO: 1495 - protein, 17 aa, Artificial Sequence
  Mouse 8C7F3 heavy chain variable complementarity determining regions 2 (CDR2) sequence
AISNGGGYTYYPDSLKG

SEQ ID NO: 1496 - DNA, 96 bp, Artificial Sequence; identical to SEQ ID NO: 1364
  Mouse 8C7F3 heavy chain variable framework 3 (FW3) sequence

SEQ ID NO: 1497 - protein, 32 aa, Artificial Sequence; identical to SEQ ID NO: 1365
  Mouse 8C7F3 heavy chain variable framework 3 (FW3) sequence

SEQ ID NO: 1498 - DNA, 27 bp, Artificial Sequence
  Mouse 8C7F3 heavy chain variable complementarity determining regions 3 (CDR3) sequence
cgttactatgatcactactttgactac

SEQ ID NO: 1499 - protein, 9 aa, Artificial Sequence
  Mouse 8C7F3 heavy chain variable complementarity determining regions 3 (CDR3) sequence
RYYDHYFDY

SEQ ID NO: 1500 - DNA, 33 bp, Artificial Sequence; identical to SEQ ID NO: 1368
  Mouse 8C7F3 heavy chain variable framework 4 (FW4) sequence

SEQ ID NO: 1501 - protein, 11 aa, Artificial Sequence
  Mouse 8C7F3 heavy chain variable framework 4 (FW4) sequence
WGQGTALTVSS

SEQ ID NO: 1502 - DNA, 69 bp, Artificial Sequence; identical to SEQ ID NO: 1428
  Mouse 8C7F3 light chain variable framework 1 (FR1) sequence

SEQ ID NO: 1503 - protein, 23 aa, Artificial Sequence
  Mouse 8C7F3 light chain variable framework 1 (FR1) sequence
IIVLTQSPASLAVSLGQRATISC

SEQ ID NO: 1504 - DNA, 45 bp, Artificial Sequence; identical to SEQ ID NO: 1430
  Mouse 8C7F3 light chain variable complementarity determining regions 1 (CDR1) sequence

SEQ ID NO: 1505 - protein, 15 aa, Artificial Sequence
  Mouse 8C7F3 light chain variable complementarity determining regions 1 (CDR1) sequence
RASESVATYGNNFMQ

SEQ ID NO: 1506 - DNA, 45 bp, Artificial Sequence
  Mouse 8C7F3 light chain variable framework 2 (FR2) sequence
tggtatcagcagaaaccaggacagccacccaaactcctcatctat

SEQ ID NO: 1507 - protein, 15 aa, Artificial Sequence
  Mouse 8C7F3 light chain variable framework 2 (FR2) sequence
WYQQKPGQPPKLLIY

SEQ ID NO: 1508 - DNA, 21 bp, Artificial Sequence
  Mouse 8C7F3 light chain variable complementarity determining regions 2 (CDR2) sequence
cttgcatccaccctagattct

SEQ ID NO: 1509 - protein, 7 aa, Artificial Sequence
  Mouse 8C7F3 light chain variable complementarity determining regions 2 (CDR2) sequence
LASTLDS

SEQ ID NO: 1510 - DNA, 96 bp, Artificial Sequence
  Mouse 8C7F3 light chain variable framework 3 (FR3) sequence
ggggtccctgccaggttcagtggcagtgggtctaggacagacttcaccctcaccattgatcctgtggaggctgatgatgctgcaacctattactgt

SEQ ID NO: 1511 - protein, 32 aa, Artificial Sequence
  Mouse 8C7F3 light chain variable framework 3 (FR3) sequence
GVPARFSGSGSRTDFTLTIDPVEADDAATYYC

SEQ ID NO: 1512 - DNA, 27 bp, Artificial Sequence
  Mouse 8C7F3 light chain variable complementarity determining regions 3 (CDR3) sequence
cagcaaaataatgaggatcctccgacg

SEQ ID NO: 1513 - protein, 9 aa, Artificial Sequence
  Mouse 8C7F3 light chain variable complementarity determining regions 3 (CDR3) sequence
QQNNEDPPT

SEQ ID NO: 1514 - DNA, 30 bp, Artificial Sequence
  Mouse 8C7F3 light chain variable framework 4 (FR4) sequence
ttcggtggaggcaccaagctggaaatcaag

SEQ ID NO: 1515 - protein, 10 aa, Artificial Sequence
  Mouse 8C7F3 light chain variable framework 4 (FR4) sequence
FGGGTKLEIK

SEQ ID NO: 1516 - DNA, 90 bp, Artificial Sequence
  Mouse H11 heavy chain variable framework 1 (FW1) sequence
gaagtggtgctggtggagtctgggggaggcttagtggagcctggagggtccctgaaactctcctgtgtagcctctggattcgcttttagt

SEQ ID NO: 1517 - protein, 30 aa, Artificial Sequence; identical to SEQ ID NO: 1433
  Mouse H11 heavy chain variable framework 1 (FW1) sequence

SEQ ID NO: 1518 - DNA, 15 bp, Artificial Sequence
  Mouse H11 heavy chain variable complementarity determining regions 1 (CDR1) sequence
acctttgccatgtct

SEQ ID NO: 1519 - protein, 5 aa, Artificial Sequence
  Mouse H11 heavy chain variable complementarity determining regions 1 (CDR1) sequence
TFAMS

SEQ ID NO: 1520 - DNA, 42 bp, Artificial Sequence; identical to SEQ ID NO: 1436
  Mouse H11 heavy chain variable framework 2 (FW2) sequence

SEQ ID NO: 1521 - protein, 14 aa, Artificial Sequence
  Mouse H11 heavy chain variable framework 2 (FW2) sequence
WIRQTPEKRLEWVA

SEQ ID NO: 1522 - DNA, 51 bp, Artificial Sequence
  Mouse H11 heavy chain variable complementarity determining regions 2 (CDR2) sequence
gccattagtaatggtggtggttacacttactatccagacactctgaagggg

SEQ ID NO: 1523 - protein, 17 aa, Artificial Sequence
  Mouse H11 heavy chain variable complementarity determining regions 2 (CDR2) sequence
AISNGGGYTYYPDTLKG

SEQ ID NO: 1524 - DNA, 96 bp, Artificial Sequence
  Mouse H11 heavy chain variable framework 3 (FW3) sequence
cgattcaccatctccagagacaatgccaagaataccctgtacctgcaaatgagtagtctgaggtctgaggacacggccgtgtattactgtgcaaga

SEQ ID NO: 1525 - protein, 32 aa, Artificial Sequence
  Mouse H11 heavy chain variable framework 3 (FW3) sequence
RFTISRDNAKNTLYLQMSSLRSEDTAVYYCAR

SEQ ID NO: 1526 - DNA, 27 bp, Artificial Sequence
  Mouse H11 heavy chain variable complementarity determining regions 3 (CDR3) sequence
cgctactatgatctctactttgactta

SEQ ID NO: 1527 - protein, 9 aa, Artificial Sequence
  Mouse H11 heavy chain variable complementarity determining regions 3 (CDR3) sequence
RYYDLYFDL

SEQ ID NO: 1528 - DNA, 33 bp, Artificial Sequence
  Mouse H11 heavy chain variable framework 4 (FW4) sequence
tggggccaaggcacctctctcatagtctcctca

SEQ ID NO: 1529 - protein, 11 aa, Artificial Sequence
  Mouse H11 heavy chain variable framework 4 (FW4) sequence
WGQGTSLIVSS

SEQ ID NO: 1530 - DNA, 69 bp, Artificial Sequence; identical to SEQ ID NO: 1446
  Mouse H11 light chain variable framework 1 (FR1) sequence

SEQ ID NO: 1531 - protein, 23 aa, Artificial Sequence
  Mouse H11 light chain variable framework 1 (FR1) sequence
DILMTQTPLSLPVSLGDQASISC

SEQ ID NO: 1532 - DNA, 48 bp, Artificial Sequence; identical to SEQ ID NO: 1448
  Mouse H11 light chain variable complementarity determining regions 1 (CDR1) sequence

SEQ ID NO: 1533 - protein, 16 aa, Artificial Sequence
  Mouse H11 light chain variable complementarity determining regions 1 (CDR1) sequence
RSSQNIVHSNGNTYLE

SEQ ID NO: 1534 - DNA, 45 bp, Artificial Sequence; identical to SEQ ID NO: 464
  Mouse H11 light chain variable framework 2 (FR2) sequence

SEQ ID NO: 1535 - protein, 15 aa, Artificial Sequence
  Mouse H11 light chain variable framework 2 (FR2) sequence
WYLQKPGQSPKLLIY

SEQ ID NO: 1536 - DNA, 21 bp, Artificial Sequence
  Mouse H11 light chain variable complementarity determining regions 2 (CDR2) sequence
aaagtttccaaccgattttct

SEQ ID NO: 1537 - protein, 7 aa, Artificial Sequence
  Mouse H11 light chain variable complementarity determining regions 2 (CDR2) sequence
KVSNRFS

SEQ ID NO: 1538 - DNA, 96 bp, Artificial Sequence; identical to SEQ ID NO: 1454
  Mouse H11 light chain variable framework 3 (FR3) sequence

SEQ ID NO: 1539 - protein, 32 aa, Artificial Sequence; identical to SEQ ID NO: 887
  Mouse H11 light chain variable framework 3 (FR3) sequence

SEQ ID NO: 1540 - DNA, 27 bp, Artificial Sequence
  Mouse H11 light chain variable complementarity determining regions 3 (CDR3) sequence
tttcaagattcacatgttcctctcacg

SEQ ID NO: 1541 - protein, 9 aa, Artificial Sequence
  Mouse H11 light chain variable complementarity determining regions 3 (CDR3) sequence
FQDSHVPLT

SEQ ID NO: 1542 - DNA, 30 bp, Artificial Sequence; identical to SEQ ID NO: 1458
  Mouse H11 light chain variable framework 4 (FR4) sequence

SEQ ID NO: 1543 - protein, 10 aa, Artificial Sequence
  Mouse H11 light chain variable framework 4 (FR4) sequence
FGAGTRLELK

SEQ ID NO: 1544 - DNA, 90 bp, Artificial Sequence; identical to SEQ ID NO: 1460
  Mouse B9 heavy chain variable framework 1 (FW1) sequence

SEQ ID NO: 1545 - protein, 30 aa, Artificial Sequence; identical to SEQ ID NO: 1461
  Mouse B9 heavy chain variable framework 1 (FW1) sequence

SEQ ID NO: 1546 - DNA, 15 bp, Artificial Sequence
  Mouse B9 heavy chain variable complementarity determining regions 1 (CDR1) sequence
agatatggcatgtct

SEQ ID NO: 1547 - protein, 5 aa, Artificial Sequence
  Mouse B9 heavy chain variable complementarity determining regions 1 (CDR1) sequence
RYGMS

SEQ ID NO: 1548 - DNA, 42 bp, Artificial Sequence; identical to SEQ ID NO: 1026
  Mouse B9 heavy chain variable framework 2 (FW2) sequence

SEQ ID NO: 1549 - protein, 14 aa, Artificial Sequence
  Mouse B9 heavy chain variable framework 2 (FW2) sequence
WVRQTPDKRLEWVA

SEQ ID NO: 1550 - DNA, 51 bp, Artificial Sequence; identical to SEQ ID NO: 1466
  Mouse B9 heavy chain variable complementarity determining regions 2 (CDR2) sequence

SEQ ID NO: 1551 - protein, 17 aa, Artificial Sequence
  Mouse B9 heavy chain variable complementarity determining regions 2 (CDR2) sequence
TISSGGTYIYYPDSVKG

SEQ ID NO: 1552 - DNA, 93 bp, Artificial Sequence
  Mouse B9 heavy chain variable framework 3 (FW3) sequence
cgattcaccatctccagagacaatgccaagaacaccctgtacctgcaaatgagcagtctgaagtctgaggacacagccatgtattactgtgca

SEQ ID NO: 1553 - protein, 32 aa, Artificial Sequence; identical to SEQ ID NO: 1469
  Mouse B9 heavy chain variable framework 3 (FW3) sequence

SEQ ID NO: 1554 - DNA, 42 bp, Artificial Sequence
  Mouse B9 heavy chain variable complementarity determining regions 3 (CDR3) sequence
agggataactacggtagtagctacgactatgctatggactac

SEQ ID NO: 1555 - protein, 13 aa, Artificial Sequence
  Mouse B9 heavy chain variable complementarity determining regions 3 (CDR3) sequence
DNYGSSYDYAMDY

SEQ ID NO: 1556 - DNA, 33 bp, Artificial Sequence
  Mouse B9 heavy chain variable framework 4 (FW4) sequence
tggggtcaaggaacctcagtcaccgtctcctct

SEQ ID NO: 1557 - protein, 11 aa, Artificial Sequence
  Mouse B9 heavy chain variable framework 4 (FW4) sequence
WGQGTSVTVSS

SEQ ID NO: 1558 - DNA, 69 bp, Artificial Sequence; identical to SEQ ID NO: 67
  Mouse B9 light chain variable framework 1 (FR1) sequence

SEQ ID NO: 1559 - protein, 23 aa, Artificial Sequence
  Mouse B9 light chain variable framework 1 (FR1) sequence
QIVLTQSPAIMSASPGEEVTLTC

SEQ ID NO: 1560 - DNA, 30 bp, Artificial Sequence
  Mouse B9 light chain variable complementarity determining regions 1 (CDR1) sequence
agtgccagctcaagtgtaagttacatgcac

SEQ ID NO: 1561 - protein, 10 aa, Artificial Sequence
  Mouse B9 light chain variable complementarity determining regions 1 (CDR1) sequence
SASSSVSYMH

SEQ ID NO: 1562 - DNA, 45 bp, Artificial Sequence; identical to SEQ ID NO: 71
  Mouse B9 light chain variable framework 2 (FR2) sequence

SEQ ID NO: 1563 - protein, 15 aa, Artificial Sequence
  Mouse B9 light chain variable framework 2 (FR2) sequence
WFQQRPGTSPKLWIY

SEQ ID NO: 1564 - DNA, 21 bp, Artificial Sequence
  Mouse B9 light chain variable complementarity determining regions 2 (CDR2) sequence
accacatccaacctggcttct

SEQ ID NO: 1565 - protein, 7 aa, Artificial Sequence
  Mouse B9 light chain variable complementarity determining regions 2 (CDR2) sequence
TTSNLAS

SEQ ID NO: 1566 - DNA, 96 bp, Artificial Sequence
  Mouse B9 light chain variable framework 3 (FR3) sequence
ggagtccctgctcgcttcagtggcagtggatctgggacctcttactctctcacaatcagccgaatggaggctgaagatgctgccacttattactgc

SEQ ID NO: 1567 - protein, 32 aa, Artificial Sequence
  Mouse B9 light chain variable framework 3 (FR3) sequence
GVPARFSGSGSGTSYSLTISRMEAEDAATYYC

SEQ ID NO: 1568 - DNA, 24 bp, Artificial Sequence
  Mouse B9 light chain variable complementarity determining regions 3 (CDR3) sequence
cagcaaaggagtagttacccattc

SEQ ID NO: 1569 - protein, 8 aa, Artificial Sequence
  Mouse B9 light chain variable complementarity determining regions 3 (CDR3) sequence
QQRSSYPF

SEQ ID NO: 1570 - DNA, 33 bp, Artificial Sequence
  Mouse B9 light chain variable framework 4 (FR4) sequence
acgttcggctcggggacaaagttggaaataaaa

SEQ ID NO: 1571 - protein, 11 aa, Artificial Sequence
  Mouse B9 light chain variable framework 4 (FR4) sequence
TFGSGTKLEIK

SEQ ID NO: 1572 - DNA, 741 bp, Artificial Sequence
  mu3C2B1 scFv sequence
gaagtgatgctggtggagtctgggggaggcttagtgaagcctggagggtccctgaaactctcctgtgcagcctctggaatcactttcagtacctataccatgtcgtgggttcgccagactccggagaagaggctggagtgggtcgcaaccattagtactggtggtgataaaacctactattcagacagtgtgaagggtcgattcaccatctccagagacaatgccaagaacaacctgtacctccaaatgagcagtctgaggtctgaggacacggccttgtattactgtgcaaggggaaccacggctatgtattactatgctatggactactggggtcaaggaacctcagtcaccgtctcctcaggtggcggaggatctggcggaggtggaagcggcggaggcggatccgacattgtgctgacacagtctcctgcttccttagctgtatctctggggcagagggccaccatctcatgcagggccagcaaaagtatcagtacatctgactataattatattcactggtaccaacagaaaccaggacagccacccaaactcctcatctatcttgcatccaacctagaatctggggtccctgccaggttcagtggcagtgggtctgggacagacttcaccctcaacatccatcctgtggaggaagaagatgctgcaacctattactgtcagcacagtagggagcttcctctcacgttcggtgctgggaccaagctggagctgaaa

SEQ ID NO: 1573 - protein, 247 aa, Artificial Sequence
  mu3C2B1 scFv sequence
EVMLVESGGGLVKPGGSLKLSCAASGITFSTYTMSWVRQTPEKRLEWVATISTGGDKTYYSDSVKGRFTISRDNAKNNLYLQMSSLRSEDTALYYCARGTTAMYYYAMDYWGQGTSVTVSSGGGGSGGGGSGGGGSDIVLTQSPASLAVSLGQRATISCRASKSISTSDYNYIHWYQQKPGQPPKLLIYLASNLESGVPARFSGSGSGTDFTLNIHPVEEEDAATYYCQHSRELPLTFGAGTKLELK

SEQ ID NO: 1574 - DNA, 741 bp, Artificial Sequence
  mu20A10 scFv full sequence
gaagtgatgctggtggaatctggcggcggactggttaagcctggcggatctctgaagctgagctgtgccgccagcggcttcacctttagcacatacgccatgagctggatccggcagacccctgagaagagactggaatgggttgccagcatcggcagagccggcagcacctactacagcgattctgtgaagggcagattcaccatcagccgggacaacgtgcggaacatcctgtacctgcagatgagcagcctgcggagcgaggataccgccatgtactactgtgccagaggacccatctacaacgactacgacgagttcgcctattggggccagggcacactggttacagtttctgctggtggcggaggatctggcggaggtggaagcggcggaggcggatccaatatcatgatgacacagagccccagcagcctggctgtgtctgctggcgagaaagtgaccatgtcctgcaagagcagccagagcgtgctgtactccagcaaccagaagaactacctggcctggtatcagcagaagcccggccagtctcctaagctgctgatctactgggccagcaccagagaaagcggcgtgcccgatagattcacaggcagcggcagcggaaccgacttcaccctgacaatcagctctgtgcaggccgaagatctggccgtgtactattgccaccagtacctgtccagcctgacctttggcgccggaacaaagctggaactgaag

SEQ ID NO: 1575 - protein, 247 aa, Artificial Sequence
  mu20A10 scFv full sequence
EVMLVESGGGLVKPGGSLKLSCAASGFTFSTYAMSWIRQTPEKRLEWVASIGRAGSTYYSDSVKGRFTISRDNVRNILYLQMSSLRSEDTAMYYCARGPIYNDYDEFAYWGQGTLVTVSAGGGGSGGGGSGGGGSNIMMTQSPSSLAVSAGEKVTMSCKSSQSVLYSSNQKNYLAWYQQKPGQSPKLLIYWASTRESGVPDRFTGSGSGTDFTLTISSVQAEDLAVYYCHQYLSSLTFGAGTKLELK

SEQ ID NO: 1576 - DNA, 741 bp, Artificial Sequence
  hu20A10M scFV
gaggtgcagctggttgaatctggcggcggacttgtgaagcctggcggatctctgagactgagctgtgccgccagcggcttcacctttagcacatacgccatgagctgggtccgacaggcccctggaaaaggccttgaatgggttgcctctatcggcagagccggcagcacctactacagcgattctgtgaagggcagattcaccatcagccgggacaacgccaagaacagcctgtacctgcagatgaactccctgagagccgaggacaccgccgtgtactattgtgccagaggacccatctacaacgactacgacgagttcgcctattggggccagggcacactggtcacagtcagctctggcggtggcggaagcggaggcggtggctccggtggcggaggcagcgacatcgtgatgacacagagcccttctagcctggccgtgtctctgggagagagagccacaatcagctgcaagagcagccagagcgtgctgtactccagcaaccagaagaactacctggcctggtatcagcagaagcccggacagtctcccaagctgctgatctactgggccagcaccagagaaagcggcgtgcccgatagattcacaggctctggcagcggcaccgacttcaccctgacaattagcagtctgcaggccgaggacgtggccgtgtactactgtcaccagtacctgagcagcctgacctttggcggcggaacaaaggtggaaatcaag

SEQ ID NO: 1577 - protein, 247 aa, Artificial Sequence
  hu20A10M scFV
EVQLVESGGGLVKPGGSLRLSCAASGFTFSTYAMSWVRQAPGKGLEWVASIGRAGSTYYSDSVKGRFTISRDNAKNSLYLQMNSLRAEDTAVYYCARGPIYNDYDEFAYWGQGTLVTVSSGGGGSGGGGSGGGGSDIVMTQSPSSLAVSLGERATISCKSSQSVLYSSNQKNYLAWYQQKPGQSPKLLIYWASTRESGVPDRFTGSGSGTDFTLTISSLQAEDVAVYYCHQYLSSLTFGGGTKVEIK

SEQ ID NO: 1578 - DNA, 744 bp, Artificial Sequence
  hu20A10C2 scFV
gaggtgcagctggttgaatctggcggcggacttgtgaagcctggcggatctctgagactgagctgtgccgccagcggcttcacctttagcacatacgccatgagctgggtccgacaggcccctggaaaaggccttgaatgggttgcctctatcggcagagccggcagcacctactacagcgattctgtgaagggcagattcaccatcagccgggacaacgccaagaacagcctgtacctgcagatgaactccctgagagccgaggacaccgccgtgtactattgtgccagaggacccatctacaacgactacgacgagttcgcctattggggccagggcacactggtcacagtcagctctggcggtggcggaagcggaggcggtggctccggtggcggaggcagcgacattgtgctgacccagtctccagcctccttggccgtgtctccaggacagagggccaccatcacctgcaagagcagccagagcgtgctgtactccagcaaccagaagaactacctggcctggtatcagcagaaaccaggacaacctcctaaactcctgatttactgggccagcaccagagaaagcggggtcccagccaggttcagcggcagtgggtctgggaccgatttcaccctcacaattaatcctgtggaagctaatgatactgcaaattattactgtcaccagtacctgagcagcctgaccttcggcggagggaccaaggtggagatcaaacga

SEQ ID NO: 1579 - protein, 248 aa, Artificial Sequence
  hu20A10C2 scFV
EVQLVESGGGLVKPGGSLRLSCAASGFTFSTYAMSWVRQAPGKGLEWVASIGRAGSTYYSDSVKGRFTISRDNAKNSLYLQMNSLRAEDTAVYYCARGPIYNDYDEFAYWGQGTLVTVSSGGGGSGGGGSGGGGSDIVLTQSPASLAVSPGQRATITCKSSQSVLYSSNQKNYLAWYQQKPGQPPKLLIYWASTRESGVPARFSGSGSGTDFTLTINPVEANDTANYYCHQYLSSLTFGGGTKVEIKR

SEQ ID NO: 1580 - DNA, 744 bp, Artificial Sequence
  hu20A10N scFV
caggtgcagctggttgaatctggcggcggacttgtgaagcctggcggatctctgagactgagctgtgccgccagcggcttcacctttagcacatacgccatgagctggatcagacaggcccctggcaaaggcctggaatgggtggcgtctattggcagagccggcagcacctactacagcgactctgtgaagggcagattcaccatcagccgggacaacgccaagaacagcctgtacctgcagatgaactccctgagagccgaggacaccgccgtgtactattgtgccagaggacccatctacaacgactacgacgagttcgcctattggggccagggcacactggtcacagtttctagcggcggtggcggaagcggaggcggtggctccggtggcggaggcagcgaaattgtgctgacacagagccccgccacactgtcactttctccaggcgaaagagccacactgagctgcaagagcagccagagcgtgctgtactccagcaaccagaagaactacctggcctggtatcagcagaagcccggccaagctcctcggctgctgatctattgggccagcacaagagagagcggcatccctgccagattttctggcagcggctctggcaccgatttcaccctgaccataagcagcctggaacctgaggacttcgccgtgtattactgccaccagtacctgagcagcctgacctttggcggaggcaccaaggtggaaatcaagcgg

SEQ ID NO: 1581 - protein, 248 aa, Artificial Sequence
  hu20A10N scFV
QVQLVESGGGLVKPGGSLRLSCAASGFTFSTYAMSWIRQAPGKGLEWVASIGRAGSTYYSDSVKGRFTISRDNAKNSLYLQMNSLRAEDTAVYYCARGPIYNDYDEFAYWGQGTLVTVSSGGGGSGGGGSGGGGSEIVLTQSPATLSLSPGERATLSCKSSQSVLYSSNQKNYLAWYQQKPGQAPRLLIYWASTRESGIPARFSGSGSGTDFTLTISSLEPEDFAVYYCHQYLSSLTFGGGTKVEIKR

SEQ ID NO: 1582 - DNA, 1479 bp, Artificial Sequence
  mu20A10CAR T841BB3z
atggccttaccagtgaccgccttgctcctgccgctggccttgctgctccacgccgccaggccggaagtgatgctggtggaatctggcggcggactggttaagcctggcggatctctgaagctgagctgtgccgccagcggcttcacctttagcacatacgccatgagctggatccggcagacccctgagaagagactggaatgggttgccagcatcggcagagccggcagcacctactacagcgattctgtgaagggcagattcaccatcagccgggacaacgtgcggaacatcctgtacctgcagatgagcagcctgcggagcgaggataccgccatgtactactgtgccagaggacccatctacaacgactacgacgagttcgcctattggggccagggcacactggttacagtttctgctggtggcggaggatctggcggaggtggaagcggcggaggcggatccaatatcatgatgacacagagcccgagcagcctggctgtgtctgctggcgagaaagtgaccatgtcctgcaagagcagccagagcgtgctgtactccagcaaccagaagaactacctggcctggtatcagcagaagcccggccagtctcctaagctgctgatctactgggccagcaccagagaaagcggcgtgcccgatagattcacaggcagcggcagcggaaccgacttcaccctgacaatcagctctgtgcaggccgaagatctggccgtgtactattgccaccagtacctgtccagcctgacctttggcgccggaacaaagctggaactgaagacaacaacccctgcccccagacctcctaccccagcccctacaattgccagccagcctctgagcctgaggcccgaggcttgtagacctgctgctggcggagccgtgcacaccagaggactggatttcgcctgcgacatctacatctgggcgcccttggccgggacttgtggggtccttctcctgtcactggttatcaccctttactgcaaacggggcagaaagaaactcctgtatatattcaaacaaccatttatgagaccagtacaaactactcaagaggaagatggctgtagctgccgatttccagaagaagaagaaggaggatgtgaactgagagtgaagttcagcaggagcgcagacgcccccgcgtacaagcagggccagaaccagctctataacgagctcaatctaggacgaagagaggagtacgatgttttggacaagagacgtggccgggaccctgagatggggggaaagccgagaaggaagaaccctcaggaaggcctgtacaatgaactgcagaaagataagatggcggaggcctacagtgagattgggatgaaaggcgagcgccggaggggcaaggggcacgatggcctttaccagggtctcagtacagccaccaaggacacctacgacgcccttcacatgcaggccctgccccctcgctgataa

SEQ ID NO: 1583 - protein, 491 aa, Artificial Sequence
  mu20A10CAR T841BB3z
MALPVTALLLPLALLLHAARPEVMLVESGGGLVKPGGSLKLSCAASGFTFSTYAMSWIRQTPEKRLEWVASIGRAGSTYYSDSVKGRFTISRDNVRNILYLQMSSLRSEDTAMYYCARGPIYNDYDEFAYWGQGTLVTVSAGGGGSGGGGSGGGGSNIMMTQSPSSLAVSAGEKVTMSCKSSQSVLYSSNQKNYLAWYQQKPGQSPKLLIYWASTRESGVPDRFTGSGSGTDFTLTISSVQAEDLAVYYCHQYLSSLTFGAGTKLELKTTTPAPRPPTPAPTIASQPLSLRPEACRPAAGGAVHTRGLDFACDIYIWAPLAGTCGVLLLSLVITLYCKRGRKKLLYIFKQPFMRPVQTTQEEDGCSCRFPEEEEGGCELRVKFSRSADAPAYKQGQNQLYNELNLGRREEYDVLDKRRGRDPEMGGKPRRKNPQEGLYNELQKDKMAEAYSEIGMKGERRRGKGHDGLYQGLSTATKDTYDALHMQALPPR

SEQ ID NO: 1584 - DNA, 1482 bp, Artificial Sequence
  hu20A10CAR T841BB3z
atggccttaccagtgaccgccttgctcctgccgctggccttgctgctccacgccgccaggccggaggtgcagctggttgaatctggcggcggacttgtgaagcctggcggatctctgagactgagctgtgccgccagcggcttcacctttagcacatacgccatgagctgggtccgacaggcccctggaaaaggccttgaatgggttgcctctatcggcagagccggcagcacctactacagcgattctgtgaagggcagattcaccatcagccgggacaacgccaagaacagcctgtacctgcagatgaactccctgagagccgaggacaccgccgtgtactattgtgccagaggacccatctacaacgactacgacgagttcgcctattggggccagggcacactggtcacagtcagctctggcggtggcggaagcggaggcggtggctccggtggcggaggcagcgacattgtgctgacccagtctccagcctccttggccgtgtctccaggacagagggccaccatcacctgcaagagcagccagagcgtgctgtactccagcaaccagaagaactacctggcctggtatcagcagaaaccaggacaacctcctaaactcctgatttactgggccagcaccagagaaagcggggtcccagccaggttcagcggcagtgggtctgggaccgatttcaccctcacaattaatcctgtggaagctaatgatactgcaaattattactgtcaccagtacctgagcagcctgaccttcggcggagggaccaaggtggagatcaaacgaacaacaacccctgcccccagacctcctaccccagcccctacaattgccagccagcctctgagcctgaggcccgaggcttgtagacctgctgctggcggagccgtgcacaccagaggactggatttcgcctgcgacatctacatctgggcgcccttggccgggacttgtggggtccttctcctgtcactggttatcaccctttactgcaaacggggcagaaagaaactcctgtatatattcaaacaaccatttatgagaccagtacaaactactcaagaggaagatggctgtagctgccgatttccagaagaagaagaaggaggatgtgaactgagagtgaagttcagcaggagcgcagacgcccccgcgtacaagcagggccagaaccagctctataacgagctcaatctaggacgaagagaggagtacgatgttttggacaagagacgtggccgggaccctgagatggggggaaagccgagaaggaagaaccctcaggaaggcctgtacaatgaactgcagaaagataagatggcggaggcctacagtgagattgggatgaaaggcgagcgccggaggggcaaggggcacgatggcctttaccagggtctcagtacagccaccaaggacacctacgacgcccttcacatgcaggccctgccccctcgctgataa

SEQ ID NO: 1585 - protein, 492 aa, Artificial Sequence
  hu20A10CAR T841BB3z
MALPVTALLLPLALLLHAARPEVQLVESGGGLVKPGGSLRLSCAASGFTFSTYAMSWVRQAPGKGLEWVASIGRAGSTYYSDSVKGRFTISRDNAKNSLYLQMNSLRAEDTAVYYCARGPIYNDYDEFAYWGQGTLVTVSSGGGGSGGGGSGGGGSDIVLTQSPASLAVSPGQRATITCKSSQSVLYSSNQKNYLAWYQQKPGQPPKLLIYWASTRESGVPARFSGSGSGTDFTLTINPVEANDTANYYCHQYLSSLTFGGGTKVEIKRTTTPAPRPPTPAPTIASQPLSLRPEACRPAAGGAVHTRGLDFACDIYIWAPLAGTCGVLLLSLVITLYCKRGRKKLLYIFKQPFMRPVQTTQEEDGCSCRFPEEEEGGCELRVKFSRSADAPAYKQGQNQLYNELNLGRREEYDVLDKRRGRDPEMGGKPRRKNPQEGLYNELQKDKMAEAYSEIGMKGERRRGKGHDGLYQGLSTATKDTYDALHMQALPPR

SEQ ID NO: 1586 - DNA, 1476 bp, Artificial Sequence
  mu20A10CAR T8283z
atggccttaccagtgaccgccttgctcctgccgctggccttgctgctccacgccgccaggccggaagtgatgctggtggaatctggcggcggactggttaagcctggcggatctctgaagctgagctgtgccgccagcggcttcacctttagcacatacgccatgagctggatccggcagacccctgagaagagactggaatgggttgccagcatcggcagagccggcagcacctactacagcgattctgtgaagggcagattcaccatcagccgggacaacgtgcggaacatcctgtacctgcagatgagcagcctgcggagcgaggataccgccatgtactactgtgccagaggacccatctacaacgactacgacgagttcgcctattggggccagggcacactggttacagtttctgctggtggcggaggatctggcggaggtggaagcggcggaggcggatccaatatcatgatgacacagagcccgagcagcctggctgtgtctgctggcgagaaagtgaccatgtcctgcaagagcagccagagcgtgctgtactccagcaaccagaagaactacctggcctggtatcagcagaagcccggccagtctcctaagctgctgatctactgggccagcaccagagaaagcggcgtgcccgatagattcacaggcagcggcagcggaaccgacttcaccctgacaatcagctctgtgcaggccgaagatctggccgtgtactattgccaccagtacctgtccagcctgacctttggcgccggaacaaagctggaactgaagacaacaacccctgcccccagacctcctaccccagcccctacaattgccagccagcctctgagcctgaggcccgaggcttgtagacctgctgctggcggagccgtgcacaccagaggactggatttcgcctgcgacatctacatctgggcgcccttggccgggacttgtggggtccttctcctgtcactggttatcaccctttactgcaggagtaagaggagcaggctcctgcacagtgactacatgaacatgactcctagaagacctgggcctaccagaaagcattaccagccctatgccccaccacgcgacttcgcagcctatcgctccagagtgaagttcagcaggagcgcagacgcccccgcgtacaagcagggccagaaccagctctataacgagctcaatctaggacgaagagaggagtacgatgttttggacaagagacgtggccgggaccctgagatggggggaaagccgagaaggaagaaccctcaggaaggcctgtacaatgaactgcagaaagataagatggcggaggcctacagtgagattgggatgaaaggcgagcgccggaggggcaaggggcacgatggcctttaccagggtctcagtacagccaccaaggacacctacgacgcccttcacatgcaggccctgccccctcgctgataa

SEQ ID NO: 1587 - protein, 490 aa, Artificial Sequence
  mu20A10CAR T8283z
MALPVTALLLPLALLLHAARPEVMLVESGGGLVKPGGSLKLSCAASGFTFSTYAMSWIRQTPEKRLEWVASIGRAGSTYYSDSVKGRFTISRDNVRNILYLQMSSLRSEDTAMYYCARGPIYNDYDEFAYWGQGTLVTVSAGGGGSGGGGSGGGGSNIMMTQSPSSLAVSAGEKVTMSCKSSQSVLYSSNQKNYLAWYQQKPGQSPKLLIYWASTRESGVPDRFTGSGSGTDFTLTISSVQAEDLAVYYCHQYLSSLTFGAGTKLELKTTTPAPRPPTPAPTIASQPLSLRPEACRPAAGGAVHTRGLDFACDIYIWAPLAGTCGVLLLSLVITLYCRSKRSRLLHSDYMNMTPRRPGPTRKHYQPYAPPRDFAAYRSRVKFSRSADAPAYKQGQNQLYNELNLGRREEYDVLDKRRGRDPEMGGKPRRKNPQEGLYNELQKDKMAEAYSEIGMKGERRRGKGHDGLYQGLSTATKDTYDALHMQALPPR

SEQ ID NO: 1588 - DNA, 1479 bp, Artificial Sequence
  hu20A10CAR T8283z
atggccttaccagtgaccgccttgctcctgccgctggccttgctgctccacgccgccaggccggaggtgcagctggttgaatctggcggcggacttgtgaagcctggcggatctctgagactgagctgtgccgccagcggcttcacctttagcacatacgccatgagctgggtccgacaggcccctggaaaaggccttgaatgggttgcctctatcggcagagccggcagcacctactacagcgattctgtgaagggcagattcaccatcagccgggacaacgccaagaacagcctgtacctgcagatgaactccctgagagccgaggacaccgccgtgtactattgtgccagaggacccatctacaacgactacgacgagttcgcctattggggccagggcacactggtcacagtcagctctggcggtggcggaagcggaggcggtggctccggtggcggaggcagcgacattgtgctgacccagtctccagcctccttggccgtgtctccaggacagagggccaccatcacctgcaagagcagccagagcgtgctgtactccagcaaccagaagaactacctggcctggtatcagcagaaaccaggacaacctcctaaactcctgatttactgggccagcaccagagaaagcggggtcccagccaggttcagcggcagtgggtctgggaccgatttcaccctcacaattaatcctgtggaagctaatgatactgcaaattattactgtcaccagtacctgagcagcctgaccttcggcggagggaccaaggtggagatcaaacgaacaacaacccctgcccccagacctcctaccccagcccctacaattgccagccagcctctgagcctgaggcccgaggcttgtagacctgctgctggcggagccgtgcacaccagaggactggatttcgcctgcgacatctacatctgggcgcccttggccgggacttgtggggtccttctcctgtcactggttatcaccctttactgcaggagtaagaggagcaggctcctgcacagtgactacatgaacatgactcctagaagacctgggcctaccagaaagcattaccagccctatgccccaccacgcgacttcgcagcctatcgctccagagtgaagttcagcaggagcgcagacgcccccgcgtacaagcagggccagaaccagctctataacgagctcaatctaggacgaagagaggagtacgatgttttggacaagagacgtggccgggaccctgagatggggggaaagccgagaaggaagaaccctcaggaaggcctgtacaatgaactgcagaaagataagatggcggaggcctacagtgagattgggatgaaaggcgagcgccggaggggcaaggggcacgatggcctttaccagggtctcagtacagccaccaaggacacctacgacgcccttcacatgcaggccctgccccctcgctgataa

SEQ ID NO: 1589 - protein, 491 aa, Artificial Sequence
  hu20A10CAR T8283z
MALPVTALLLPLALLLHAARPEVQLVESGGGLVKPGGSLRLSCAASGFTFSTYAMSWVRQAPGKGLEWVASIGRAGSTYYSDSVKGRFTISRDNAKNSLYLQMNSLRAEDTAVYYCARGPIYNDYDEFAYWGQGTLVTVSSGGGGSGGGGSGGGGSDIVLTQSPASLAVSPGQRATITCKSSQSVLYSSNQKNYLAWYQQKPGQPPKLLIYWASTRESGVPARFSGSGSGTDFTLTINPVEANDTANYYCHQYLSSLTFGGGTKVEIKRTTTPAPRPPTPAPTIASQPLSLRPEACRPAAGGAVHTRGLDFACDIYIWAPLAGTCGVLLLSLVITLYCRSKRSRLLHSDYMNMTPRRPGPTRKHYQPYAPPRDFAAYRSRVKFSRSADAPAYKQGQNQLYNELNLGRREEYDVLDKRRGRDPEMGGKPRRKNPQEGLYNELQKDKMAEAYSEIGMKGERRRGKGHDGLYQGLSTATKDTYDALHMQALPPR

SEQ ID NO: 1590 - DNA, 1479 bp, Artificial Sequence
  mu20A10CAR T841BB3z1XX
atggccttaccagtgaccgccttgctcctgccgctggccttgctgctccacgccgccaggccggaagtgatgctggtggaatctggcggcggactggttaagcctggcggatctctgaagctgagctgtgccgccagcggcttcacctttagcacatacgccatgagctggatccggcagacccctgagaagagactggaatgggttgccagcatcggcagagccggcagcacctactacagcgattctgtgaagggcagattcaccatcagccgggacaacgtgcggaacatcctgtacctgcagatgagcagcctgcggagcgaggataccgccatgtactactgtgccagaggacccatctacaacgactacgacgagttcgcctattggggccagggcacactggttacagtttctgctggtggcggaggatctggcggaggtggaagcggcggaggcggatccaatatcatgatgacacagagcccgagcagcctggctgtgtctgctggcgagaaagtgaccatgtcctgcaagagcagccagagcgtgctgtactccagcaaccagaagaactacctggcctggtatcagcagaagcccggccagtctcctaagctgctgatctactgggccagcaccagagaaagcggcgtgcccgatagattcacaggcagcggcagcggaaccgacttcaccctgacaatcagctctgtgcaggccgaagatctggccgtgtactattgccaccagtacctgtccagcctgacctttggcgccggaacaaagctggaactgaagacaacaacccctgcccccagacctcctaccccagcccctacaattgccagccagcctctgagcctgaggcccgaggcttgtagacctgctgctggcggagccgtgcacaccagaggactggatttcgcctgcgacatctacatctgggcgcccttggccgggacttgtggggtccttctcctgtcactggttatcaccctttactgcaaacggggcagaaagaaactcctgtatatattcaaacaaccatttatgagaccagtacaaactactcaagaggaagatggctgtagctgccgatttccagaagaagaagaaggaggatgtgaactgagagtgaagttcagcaggagcgcagacgcccccgcgtacaagcagggccagaaccagctctataacgagctcaatctaggacgaagagaggagtacgatgttttggacaagagacgtggccgggaccctgagatggggggaaagccgagaaggaagaaccctcaggaaggcctgttcaatgaactgcagaaagataagatggcggaggccttcagtgagattgggatgaaaggcgagcgccggaggggcaaggggcacgatggccttttccagggtctcagtacagccaccaaggacaccttcgacgcccttcacatgcaggccctgccccctcgctgataa

SEQ ID NO: 1591 - protein, 491 aa, Artificial Sequence
  mu20A10CAR T841BB3z1XX
MALPVTALLLPLALLLHAARPEVMLVESGGGLVKPGGSLKLSCAASGFTFSTYAMSWIRQTPEKRLEWVASIGRAGSTYYSDSVKGRFTISRDNVRNILYLQMSSLRSEDTAMYYCARGPIYNDYDEFAYWGQGTLVTVSAGGGGSGGGGSGGGGSNIMMTQSPSSLAVSAGEKVTMSCKSSQSVLYSSNQKNYLAWYQQKPGQSPKLLIYWASTRESGVPDRFTGSGSGTDFTLTISSVQAEDLAVYYCHQYLSSLTFGAGTKLELKTTTPAPRPPTPAPTIASQPLSLRPEACRPAAGGAVHTRGLDFACDIYIWAPLAGTCGVLLLSLVITLYCKRGRKKLLYIFKQPFMRPVQTTQEEDGCSCRFPEEEEGGCELRVKFSRSADAPAYKQGQNQLYNELNLGRREEYDVLDKRRGRDPEMGGKPRRKNPQEGLFNELQKDKMAEAFSEIGMKGERRRGKGHDGLFQGLSTATKDTFDALHMQALPPR

SEQ ID NO: 1592 - DNA, 1482 bp, Artificial Sequence
  hu20A10CAR T841BB3z1XX
atggccttaccagtgaccgccttgctcctgccgctggccttgctgctccacgccgccaggccggaggtgcagctggttgaatctggcggcggacttgtgaagcctggcggatctctgagactgagctgtgccgccagcggcttcacctttagcacatacgccatgagctgggtccgacaggcccctggaaaaggccttgaatgggttgcctctatcggcagagccggcagcacctactacagcgattctgtgaagggcagattcaccatcagccgggacaacgccaagaacagcctgtacctgcagatgaactccctgagagccgaggacaccgccgtgtactattgtgccagaggacccatctacaacgactacgacgagttcgcctattggggccagggcacactggtcacagtcagctctggcggtggcggaagcggaggcggtggctccggtggcggaggcagcgacattgtgctgacccagtctccagcctccttggccgtgtctccaggacagagggccaccatcacctgcaagagcagccagagcgtgctgtactccagcaaccagaagaactacctggcctggtatcagcagaaaccaggacaacctcctaaactcctgatttactgggccagcaccagagaaagcggggtcccagccaggttcagcggcagtgggtctgggaccgatttcaccctcacaattaatcctgtggaagctaatgatactgcaaattattactgtcaccagtacctgagcagcctgaccttcggcggagggaccaaggtggagatcaaacgaacaacaacccctgcccccagacctcctaccccagcccctacaattgccagccagcctctgagcctgaggcccgaggcttgtagacctgctgctggcggagccgtgcacaccagaggactggatttcgcctgcgacatctacatctgggcgcccttggccgggacttgtggggtccttctcctgtcactggttatcaccctttactgcaaacggggcagaaagaaactcctgtatatattcaaacaaccatttatgagaccagtacaaactactcaagaggaagatggctgtagctgccgatttccagaagaagaagaaggaggatgtgaactgagagtgaagttcagcaggagcgcagacgcccccgcgtacaagcagggccagaaccagctctataacgagctcaatctaggacgaagagaggagtacgatgttttggacaagagacgtggccgggaccctgagatggggggaaagccgagaaggaagaaccctcaggaaggcctgttcaatgaactgcagaaagataagatggcggaggccttcagtgagattgggatgaaaggcgagcgccggaggggcaaggggcacgatggccttttccagggtctcagtacagccaccaaggacaccttcgacgcccttcacatgcaggccctgccccctcgctgataa

SEQ ID NO: 1593 - protein, 492 aa, Artificial Sequence
  hu20A10CAR T841BB3z1XX
MALPVTALLLPLALLLHAARPEVQLVESGGGLVKPGGSLRLSCAASGFTFSTYAMSWVRQAPGKGLEWVASIGRAGSTYYSDSVKGRFTISRDNAKNSLYLQMNSLRAEDTAVYYCARGPIYNDYDEFAYWGQGTLVTVSSGGGGSGGGGSGGGGSDIVLTQSPASLAVSPGQRATITCKSSQSVLYSSNQKNYLAWYQQKPGQPPKLLIYWASTRESGVPARFSGSGSGTDFTLTINPVEANDTANYYCHQYLSSLTFGGGTKVEIKRTTTPAPRPPTPAPTIASQPLSLRPEACRPAAGGAVHTRGLDFACDIYIWAPLAGTCGVLLLSLVITLYCKRGRKKLLYIFKQPFMRPVQTTQEEDGCSCRFPEEEEGGCELRVKFSRSADAPAYKQGQNQLYNELNLGRREEYDVLDKRRGRDPEMGGKPRRKNPQEGLFNELQKDKMAEAFSEIGMKGERRRGKGHDGLFQGLSTATKDTFDALHMQALPPR

SEQ ID NO: 1594 - DNA, 1476 bp, Artificial Sequence
  mu20A10CAR T8283z1XX
atggccttaccagtgaccgccttgctcctgccgctggccttgctgctccacgccgccaggccggaagtgatgctggtggaatctggcggcggactggttaagcctggcggatctctgaagctgagctgtgccgccagcggcttcacctttagcacatacgccatgagctggatccggcagacccctgagaagagactggaatgggttgccagcatcggcagagccggcagcacctactacagcgattctgtgaagggcagattcaccatcagccgggacaacgtgcggaacatcctgtacctgcagatgagcagcctgcggagcgaggataccgccatgtactactgtgccagaggacccatctacaacgactacgacgagttcgcctattggggccagggcacactggttacagtttctgctggtggcggaggatctggcggaggtggaagcggcggaggcggatccaatatcatgatgacacagagcccgagcagcctggctgtgtctgctggcgagaaagtgaccatgtcctgcaagagcagccagagcgtgctgtactccagcaaccagaagaactacctggcctggtatcagcagaagcccggccagtctcctaagctgctgatctactgggccagcaccagagaaagcggcgtgcccgatagattcacaggcagcggcagcggaaccgacttcaccctgacaatcagctctgtgcaggccgaagatctggccgtgtactattgccaccagtacctgtccagcctgacctttggcgccggaacaaagctggaactgaagacaacaacccctgcccccagacctcctaccccagcccctacaattgccagccagcctctgagcctgaggcccgaggcttgtagacctgctgctggcggagccgtgcacaccagaggactggatttcgcctgcgacatctacatctgggcgcccttggccgggacttgtggggtccttctcctgtcactggttatcaccctttactgcaggagtaagaggagcaggctcctgcacagtgactacatgaacatgactcctagaagacctgggcctaccagaaagcattaccagccctatgccccaccacgcgacttcgcagcctatcgctccagagtgaagttcagcaggagcgcagacgcccccgcgtacaagcagggccagaaccagctctataacgagctcaatctaggacgaagagaggagtacgatgttttggacaagagacgtggccgggaccctgagatggggggaaagccgagaaggaagaaccctcaggaaggcctgttcaatgaactgcagaaagataagatggcggaggccttcagtgagattgggatgaaaggcgagcgccggaggggcaaggggcacgatggccttttccagggtctcagtacagccaccaaggacaccttcgacgcccttcacatgcaggccctgccccctcgctgataa

SEQ ID NO: 1595 - protein, 490 aa, Artificial Sequence
  mu20A10CAR T8283z1XX
MALPVTALLLPLALLLHAARPEVMLVESGGGLVKPGGSLKLSCAASGFTFSTYAMSWIRQTPEKRLEWVASIGRAGSTYYSDSVKGRFTISRDNVRNILYLQMSSLRSEDTAMYYCARGPIYNDYDEFAYWGQGTLVTVSAGGGGSGGGGSGGGGSNIMMTQSPSSLAVSAGEKVTMSCKSSQSVLYSSNQKNYLAWYQQKPGQSPKLLIYWASTRESGVPDRFTGSGSGTDFTLTISSVQAEDLAVYYCHQYLSSLTFGAGTKLELKTTTPAPRPPTPAPTIASQPLSLRPEACRPAAGGAVHTRGLDFACDIYIWAPLAGTCGVLLLSLVITLYCRSKRSRLLHSDYMNMTPRRPGPTRKHYQPYAPPRDFAAYRSRVKFSRSADAPAYKQGQNQLYNELNLGRREEYDVLDKRRGRDPEMGGKPRRKNPQEGLFNELQKDKMAEAFSEIGMKGERRRGKGHDGLFQGLSTATKDTFDALHMQALPPR

SEQ ID NO: 1596 - DNA, 1479 bp, Artificial Sequence
  hu20A10CAR T8283z1XX
atggccttaccagtgaccgccttgctcctgccgctggccttgctgctccacgccgccaggccggaggtgcagctggttgaatctggcggcggacttgtgaagcctggcggatctctgagactgagctgtgccgccagcggcttcacctttagcacatacgccatgagctgggtccgacaggcccctggaaaaggccttgaatgggttgcctctatcggcagagccggcagcacctactacagcgattctgtgaagggcagattcaccatcagccgggacaacgccaagaacagcctgtacctgcagatgaactccctgagagccgaggacaccgccgtgtactattgtgccagaggacccatctacaacgactacgacgagttcgcctattggggccagggcacactggtcacagtcagctctggcggtggcggaagcggaggcggtggctccggtggcggaggcagcgacattgtgctgacccagtctccagcctccttggccgtgtctccaggacagagggccaccatcacctgcaagagcagccagagcgtgctgtactccagcaaccagaagaactacctggcctggtatcagcagaaaccaggacaacctcctaaactcctgatttactgggccagcaccagagaaagcggggtcccagccaggttcagcggcagtgggtctgggaccgatttcaccctcacaattaatcctgtggaagctaatgatactgcaaattattactgtcaccagtacctgagcagcctgaccttcggcggagggaccaaggtggagatcaaacgaacaacaacccctgcccccagacctcctaccccagcccctacaattgccagccagcctctgagcctgaggcccgaggcttgtagacctgctgctggcggagccgtgcacaccagaggactggatttcgcctgcgacatctacatctgggcgcccttggccgggacttgtggggtccttctcctgtcactggttatcaccctttactgcaggagtaagaggagcaggctcctgcacagtgactacatgaacatgactcctagaagacctgggcctaccagaaagcattaccagccctatgccccaccacgcgacttcgcagcctatcgctccagagtgaagttcagcaggagcgcagacgcccccgcgtacaagcagggccagaaccagctctataacgagctcaatctaggacgaagagaggagtacgatgttttggacaagagacgtggccgggaccctgagatggggggaaagccgagaaggaagaaccctcaggaaggcctgttcaatgaactgcagaaagataagatggcggaggccttcagtgagattgggatgaaaggcgagcgccggaggggcaaggggcacgatggccttttccagggtctcagtacagccaccaaggacaccttcgacgcccttcacatgcaggccctgccccctcgctgataa

SEQ ID NO: 1597 - protein, 491 aa, Artificial Sequence
  hu20A10CAR T8283z1XX
MALPVTALLLPLALLLHAARPEVQLVESGGGLVKPGGSLRLSCAASGFTFSTYAMSWVRQAPGKGLEWVASIGRAGSTYYSDSVKGRFTISRDNAKNSLYLQMNSLRAEDTAVYYCARGPIYNDYDEFAYWGQGTLVTVSSGGGGSGGGGSGGGGSDIVLTQSPASLAVSPGQRATITCKSSQSVLYSSNQKNYLAWYQQKPGQPPKLLIYWASTRESGVPARFSGSGSGTDFTLTINPVEANDTANYYCHQYLSSLTFGGGTKVEIKRTTTPAPRPPTPAPTIASQPLSLRPEACRPAAGGAVHTRGLDFACDIYIWAPLAGTCGVLLLSLVITLYCRSKRSRLLHSDYMNMTPRRPGPTRKHYQPYAPPRDFAAYRSRVKFSRSADAPAYKQGQNQLYNELNLGRREEYDVLDKRRGRDPEMGGKPRRKNPQEGLFNELQKDKMAEAFSEIGMKGERRRGKGHDGLFQGLSTATKDTFDALHMQALPPR

SEQ ID NO: 1598 - DNA, 738 bp, Artificial Sequence
  mu25E6 scFv full sequence
gaggtgcagctggtggagtctgggggagacttagtgaagcctggagggtccctgaaactctcctgtgcagcctctggtttcactttcagtagttatggaatgtcttgggttcgccagactccagacaagaggctggagtgggtcgcaaccattagtaatggtggtagacacaccttctatccagacagtgtgaaggggcgattcaccatctccagagacaatgccaagaacaccctgtatctgcaaatgagcagtctgaagtctgaggacacagccatgtatttatgtgtaagacagactgggacggagggctggtttgcttactggggccaagggactctggtcactgtctctgcaggtggcggaggatctggcggaggtggaagcggcggaggcggatccgatgttgtgatgacccagactccactcactttgtcggttaccattggacaaccagcctccatctcttgcaagtcaagtcagagcctcttagatagtgatggaaagacatatttgaattggttgttacagaggccaggccagtctccaaagcgcctaatctatctggtgtctaaactggactctggagtccctgacaggttcactggcagtggatcagggacagatttcacactgaaaatcagcagagtggaggctgaggatttgggagtttattattgctggcaaggtacacattttcctcagacgttcggtggaggcaccaagctggaaatcaaa

SEQ ID NO: 1599 - protein, 246 aa, Artificial Sequence
  mu25E6 scFv full sequence
EVQLVESGGDLVKPGGSLKLSCAASGFTFSSYGMSWVRQTPDKRLEWVATISNGGRHTFYPDSVKGRFTISRDNAKNTLYLQMSSLKSEDTAMYLCVRQTGTEGWFAYWGQGTLVTVSAGGGGSGGGGSGGGGSDVVMTQTPLTLSVTIGQPASISCKSSQSLLDSDGKTYLNWLLQRPGQSPKRLIYLVSKLDSGVPDRFTGSGSGTDFTLKISRVEAEDLGVYYCWQGTHFPQTFGGGTKLEIK

SEQ ID NO: 1600 - DNA, 738 bp, Artificial Sequence
  hu25E6 full sequence
gaggtgcagctggtggaatctggcggaggactggtcaagcctggaggcagcctgagactgagctgcgccgccagcggcttcacattcagcagctacggcatgagctgggtgcggcaggcccctggcaagggcctggaatgggtcagcaccatcagcaacggcggaagacacaccttctaccccgacagcgtgaagggcagattcaccatctcaagagataacgccaagaacagcctgtacctgcagatgaacagcctgcgggccgaggacaccgccgtgtactactgcgccagacagaccggcacagagggctggttcgcctactggggccagggcaccctggtgaccgtgtccagcggcggtggcggaagcggaggcggtggctccggtggcggaggcagcgacatcgtgatgacccagacccctctgtctctgagcgtgacccctggccagcctgccagcatctcttgtaaaagcagccagagcctgctggacagcgacggcaagacctacctgaactggtacctgcagaagcccggccaaagccctcagctgctgatctacctggtgtccaagctggatagcggtgttcctgatagattcagcggatctggcagcggcaccgacttcaccctgaagatcagcagagtggaagccgaggacgtgggcgtgtactactgctggcagggcacacacttcccccagacattcggccagggcaccaaggtggaaatcaag

SEQ ID NO: 1601 - protein, 246 aa, Artificial Sequence
  hu25E6 full sequence
EVQLVESGGGLVKPGGSLRLSCAASGFTFSSYGMSWVRQAPGKGLEWVSTISNGGRHTFYPDSVKGRFTISRDNAKNSLYLQMNSLRAEDTAVYYCARQTGTEGWFAYWGQGTLVTVSSGGGGSGGGGSGGGGSDIVMTQTPLSLSVTPGQPASISCKSSQSLLDSDGKTYLNWYLQKPGQSPQLLIYLVSKLDSGVPDRFSGSGSGTDFTLKISRVEAEDVGVYYCWQGTHFPQTFGQGTKVEIK

SEQ ID NO: 1602 - DNA, 1476 bp, Artificial Sequence
  mu25E6CAR T841BB3z
atggccttaccagtgaccgccttgctcctgccgctggccttgctgctccacgccgccaggccggaggtgcagctggtggagtctgggggagacttagtgaagcctggagggtccctgaaactctcctgtgcagcctctggtttcactttcagtagttatggaatgtcttgggttcgccagactccagacaagaggctggagtgggtcgcaaccattagtaatggtggtagacacaccttctatccagacagtgtgaaggggcgattcaccatctccagagacaatgccaagaacaccctgtatctgcaaatgagcagtctgaagtctgaggacacagccatgtatttatgtgtaagacagactgggacggagggctggtttgcttactggggccaagggactctggtcactgtctctgcaggtggcggaggatctggcggaggtggaagcggcggaggcggatccgatgttgtgatgacccagactccactcactttgtcggttaccattggacaaccagcctccatctcttgcaagtcaagtcagagcctcttagatagtgatggaaagacatatttgaattggttgttacagaggccaggccagtctccaaagcgcctaatctatctggtgtctaaactggactctggagtccctgacaggttcactggcagtggatcagggacagatttcacactgaaaatcagcagagtggaggctgaggatttgggagtttattattgctggcaaggtacacattttcctcagacgttcggtggaggcaccaagctggaaatcaaaacaacaacccctgcccccagacctcctaccccagcccctacaattgccagccagcctctgagcctgaggcccgaggcttgtagacctgctgctggcggagccgtgcacaccagaggactggatttcgcctgcgacatctacatctgggcgcccttggccgggacttgtggggtccttctcctgtcactggttatcaccctttactgcaaacggggcagaaagaaactcctgtatatattcaaacaaccatttatgagaccagtacaaactactcaagaggaagatggctgtagctgccgatttccagaagaagaagaaggaggatgtgaactgagagtgaagttcagcaggagcgcagacgcccccgcgtacaagcagggccagaaccagctctataacgagctcaatctaggacgaagagaggagtacgatgttttggacaagagacgtggccgggaccctgagatggggggaaagccgagaaggaagaaccctcaggaaggcctgtacaatgaactgcagaaagataagatggcggaggcctacagtgagattgggatgaaaggcgagcgccggaggggcaaggggcacgatggcctttaccagggtctcagtacagccaccaaggacacctacgacgcccttcacatgcaggccctgccccctcgctgataa

SEQ ID NO: 1603 - protein, 490 aa, Artificial Sequence
  mu25E6CAR T841BB3z
MALPVTALLLPLALLLHAARPEVQLVESGGDLVKPGGSLKLSCAASGFTFSSYGMSWVRQTPDKRLEWVATISNGGRHTFYPDSVKGRFTISRDNAKNTLYLQMSSLKSEDTAMYLCVRQTGTEGWFAYWGQGTLVTVSAGGGGSGGGGSGGGGSDVVMTQTPLTLSVTIGQPASISCKSSQSLLDSDGKTYLNWLLQRPGQSPKRLIYLVSKLDSGVPDRFTGSGSGTDFTLKISRVEAEDLGVYYCWQGTHFPQTFGGGTKLEIKTTTPAPRPPTPAPTIASQPLSLRPEACRPAAGGAVHTRGLDFACDIYIWAPLAGTCGVLLLSLVITLYCKRGRKKLLYIFKQPFMRPVQTTQEEDGCSCRFPEEEEGGCELRVKFSRSADAPAYKQGQNQLYNELNLGRREEYDVLDKRRGRDPEMGGKPRRKNPQEGLYNELQKDKMAEAYSEIGMKGERRRGKGHDGLYQGLSTATKDTYDALHMQALPPR

SEQ ID NO: 1604 - DNA, 1476 bp, Artificial Sequence
  hu25E6CAR T841BB3z
atggccttaccagtgaccgccttgctcctgccgctggccttgctgctccacgccgccaggccggaggtgcagctggtggaatctggcggaggactggtcaagcctggaggcagcctgagactgagctgcgccgccagcggcttcacattcagcagctacggcatgagctgggtgcggcaggcccctggcaagggcctggaatgggtcagcaccatcagcaacggcggaagacacaccttctaccccgacagcgtgaagggcagattcaccatctcaagagataacgccaagaacagcctgtacctgcagatgaacagcctgcgggccgaggacaccgccgtgtactactgcgccagacagaccggcacagagggctggttcgcctactggggccagggcaccctggtgaccgtgtccagcggcggtggcggaagcggaggcggtggctccggtggcggaggcagcgacatcgtgatgacccagacccctctgtctctgagcgtgacccctggccagcctgccagcatctcttgtaaaagcagccagagcctgctggacagcgacggcaagacctacctgaactggtacctgcagaagcccggccaaagccctcagctgctgatctacctggtgtccaagctggatagcggtgttcctgatagattcagcggatctggcagcggcaccgacttcaccctgaagatcagcagagtggaagccgaggacgtgggcgtgtactactgctggcagggcacacacttcccccagacattcggccagggcaccaaggtggaaatcaagacaacaacccctgcccccagacctcctaccccagcccctacaattgccagccagcctctgagcctgaggcccgaggcttgtagacctgctgctggcggagccgtgcacaccagaggactggatttcgcctgcgacatctacatctgggcgcccttggccgggacttgtggggtccttctcctgtcactggttatcaccctttactgcaaacggggcagaaagaaactcctgtatatattcaaacaaccatttatgagaccagtacaaactactcaagaggaagatggctgtagctgccgatttccagaagaagaagaaggaggatgtgaactgagagtgaagttcagcaggagcgcagacgcccccgcgtacaagcagggccagaaccagctctataacgagctcaatctaggacgaagagaggagtacgatgttttggacaagagacgtggccgggaccctgagatggggggaaagccgagaaggaagaaccctcaggaaggcctgtacaatgaactgcagaaagataagatggcggaggcctacagtgagattgggatgaaaggcgagcgccggaggggcaaggggcacgatggcctttaccagggtctcagtacagccaccaaggacacctacgacgcccttcacatgcaggccctgccccctcgctgataa

SEQ ID NO: 1605 - protein, 490 aa, Artificial Sequence
  hu25E6CAR T841BB3z
MALPVTALLLPLALLLHAARPEVQLVESGGGLVKPGGSLRLSCAASGFTFSSYGMSWVRQAPGKGLEWVSTISNGGRHTFYPDSVKGRFTISRDNAKNSLYLQMNSLRAEDTAVYYCARQTGTEGWFAYWGQGTLVTVSSGGGGSGGGGSGGGGSDIVMTQTPLSLSVTPGQPASISCKSSQSLLDSDGKTYLNWYLQKPGQSPQLLIYLVSKLDSGVPDRFSGSGSGTDFTLKISRVEAEDVGVYYCWQGTHFPQTFGQGTKVEIKTTTPAPRPPTPAPTIASQPLSLRPEACRPAAGGAVHTRGLDFACDIYIWAPLAGTCGVLLLSLVITLYCKRGRKKLLYIFKQPFMRPVQTTQEEDGCSCRFPEEEEGGCELRVKFSRSADAPAYKQGQNQLYNELNLGRREEYDVLDKRRGRDPEMGGKPRRKNPQEGLYNELQKDKMAEAYSEIGMKGERRRGKGHDGLYQGLSTATKDTYDALHMQALPPR

SEQ ID NO: 1606 - DNA, 1473 bp, Artificial Sequence
  mu25E6CAR T8283z
atggccttaccagtgaccgccttgctcctgccgctggccttgctgctccacgccgccaggccggaggtgcagctggtggagtctgggggagacttagtgaagcctggagggtccctgaaactctcctgtgcagcctctggtttcactttcagtagttatggaatgtcttgggttcgccagactccagacaagaggctggagtgggtcgcaaccattagtaatggtggtagacacaccttctatccagacagtgtgaaggggcgattcaccatctccagagacaatgccaagaacaccctgtatctgcaaatgagcagtctgaagtctgaggacacagccatgtatttatgtgtaagacagactgggacggagggctggtttgcttactggggccaagggactctggtcactgtctctgcaggtggcggaggatctggcggaggtggaagcggcggaggcggatccgatgttgtgatgacccagactccactcactttgtcggttaccattggacaaccagcctccatctcttgcaagtcaagtcagagcctcttagatagtgatggaaagacatatttgaattggttgttacagaggccaggccagtctccaaagcgcctaatctatctggtgtctaaactggactctggagtccctgacaggttcactggcagtggatcagggacagatttcacactgaaaatcagcagagtggaggctgaggatttgggagtttattattgctggcaaggtacacattttcctcagacgttcggtggaggcaccaagctggaaatcaaaacaacaacccctgcccccagacctcctaccccagcccctacaattgccagccagcctctgagcctgaggcccgaggcttgtagacctgctgctggcggagccgtgcacaccagaggactggatttcgcctgcgacatctacatctgggcgcccttggccgggacttgtggggtccttctcctgtcactggttatcaccctttactgcaggagtaagaggagcaggctcctgcacagtgactacatgaacatgactcctagaagacctgggcctaccagaaagcattaccagccctatgccccaccacgcgacttcgcagcctatcgctccagagtgaagttcagcaggagcgcagacgcccccgcgtacaagcagggccagaaccagctctataacgagctcaatctaggacgaagagaggagtacgatgttttggacaagagacgtggccgggaccctgagatggggggaaagccgagaaggaagaaccctcaggaaggcctgtacaatgaactgcagaaagataagatggcggaggcctacagtgagattgggatgaaaggcgagcgccggaggggcaaggggcacgatggcctttaccagggtctcagtacagccaccaaggacacctacgacgcccttcacatgcaggccctgccccctcgctgataa

SEQ ID NO: 1607 - protein, 489 aa, Artificial Sequence
  mu25E6CAR T8283z
MALPVTALLLPLALLLHAARPEVQLVESGGDLVKPGGSLKLSCAASGFTFSSYGMSWVRQTPDKRLEWVATISNGGRHTFYPDSVKGRFTISRDNAKNTLYLQMSSLKSEDTAMYLCVRQTGTEGWFAYWGQGTLVTVSAGGGGSGGGGSGGGGSDVVMTQTPLTLSVTIGQPASISCKSSQSLLDSDGKTYLNWLLQRPGQSPKRLIYLVSKLDSGVPDRFTGSGSGTDFTLKISRVEAEDLGVYYCWQGTHFPQTFGGGTKLEIKTTTPAPRPPTPAPTIASQPLSLRPEACRPAAGGAVHTRGLDFACDIYIWAPLAGTCGVLLLSLVITLYCRSKRSRLLHSDYMNMTPRRPGPTRKHYQPYAPPRDFAAYRSRVKFSRSADAPAYKQGQNQLYNELNLGRREEYDVLDKRRGRDPEMGGKPRRKNPQEGLYNELQKDKMAEAYSEIGMKGERRRGKGHDGLYQGLSTATKDTYDALHMQALPPR

SEQ ID NO: 1608 - DNA, 1473 bp, Artificial Sequence
  hu25E6CAR T8283z
atggccttaccagtgaccgccttgctcctgccgctggccttgctgctccacgccgccaggccggaggtgcagctggtggaatctggcggaggactggtcaagcctggaggcagcctgagactgagctgcgccgccagcggcttcacattcagcagctacggcatgagctgggtgcggcaggcccctggcaagggcctggaatgggtcagcaccatcagcaacggcggaagacacaccttctaccccgacagcgtgaagggcagattcaccatctcaagagataacgccaagaacagcctgtacctgcagatgaacagcctgcgggccgaggacaccgccgtgtactactgcgccagacagaccggcacagagggctggttcgcctactggggccagggcaccctggtgaccgtgtccagcggcggtggcggaagcggaggcggtggctccggtggcggaggcagcgacatcgtgatgacccagacccctctgtctctgagcgtgacccctggccagcctgccagcatctcttgtaaaagcagccagagcctgctggacagcgacggcaagacctacctgaactggtacctgcagaagcccggccaaagccctcagctgctgatctacctggtgtccaagctggatagcggtgttcctgatagattcagcggatctggcagcggcaccgacttcaccctgaagatcagcagagtggaagccgaggacgtgggcgtgtactactgctggcagggcacacacttcccccagacattcggccagggcaccaaggtggaaatcaagacaacaacccctgcccccagacctcctaccccagcccctacaattgccagccagcctctgagcctgaggcccgaggcttgtagacctgctgctggcggagccgtgcacaccagaggactggatttcgcctgcgacatctacatctgggcgcccttggccgggacttgtggggtccttctcctgtcactggttatcaccctttactgcaggagtaagaggagcaggctcctgcacagtgactacatgaacatgactcctagaagacctgggcctaccagaaagcattaccagccctatgccccaccacgcgacttcgcagcctatcgctccagagtgaagttcagcaggagcgcagacgcccccgcgtacaagcagggccagaaccagctctataacgagctcaatctaggacgaagagaggagtacgatgttttggacaagagacgtggccgggaccctgagatggggggaaagccgagaaggaagaaccctcaggaaggcctgtacaatgaactgcagaaagataagatggcggaggcctacagtgagattgggatgaaaggcgagcgccggaggggcaaggggcacgatggcctttaccagggtctcagtacagccaccaaggacacctacgacgcccttcacatgcaggccctgccccctcgctgataa

SEQ ID NO: 1609 - protein, 489 aa, Artificial Sequence
  hu25E6CAR T8283z
MALPVTALLLPLALLLHAARPEVQLVESGGGLVKPGGSLRLSCAASGFTFSSYGMSWVRQAPGKGLEWVSTISNGGRHTFYPDSVKGRFTISRDNAKNSLYLQMNSLRAEDTAVYYCARQTGTEGWFAYWGQGTLVTVSSGGGGSGGGGSGGGGSDIVMTQTPLSLSVTPGQPASISCKSSQSLLDSDGKTYLNWYLQKPGQSPQLLIYLVSKLDSGVPDRFSGSGSGTDFTLKISRVEAEDVGVYYCWQGTHFPQTFGQGTKVEIKTTTPAPRPPTPAPTIASQPLSLRPEACRPAAGGAVHTRGLDFACDIYIWAPLAGTCGVLLLSLVITLYCRSKRSRLLHSDYMNMTPRRPGPTRKHYQPYAPPRDFAAYRSRVKFSRSADAPAYKQGQNQLYNELNLGRREEYDVLDKRRGRDPEMGGKPRRKNPQEGLYNELQKDKMAEAYSEIGMKGERRRGKGHDGLYQGLSTATKDTYDALHMQALPPR

SEQ ID NO: 1610 - DNA, 1476 bp, Artificial Sequence
  mu25E6CAR T841BB3z1XX
atggccttaccagtgaccgccttgctcctgccgctggccttgctgctccacgccgccaggccggaggtgcagctggtggagtctgggggagacttagtgaagcctggagggtccctgaaactctcctgtgcagcctctggtttcactttcagtagttatggaatgtcttgggttcgccagactccagacaagaggctggagtgggtcgcaaccattagtaatggtggtagacacaccttctatccagacagtgtgaaggggcgattcaccatctccagagacaatgccaagaacaccctgtatctgcaaatgagcagtctgaagtctgaggacacagccatgtatttatgtgtaagacagactgggacggagggctggtttgcttactggggccaagggactctggtcactgtctctgcaggtggcggaggatctggcggaggtggaagcggcggaggcggatccgatgttgtgatgacccagactccactcactttgtcggttaccattggacaaccagcctccatctcttgcaagtcaagtcagagcctcttagatagtgatggaaagacatatttgaattggttgttacagaggccaggccagtctccaaagcgcctaatctatctggtgtctaaactggactctggagtccctgacaggttcactggcagtggatcagggacagatttcacactgaaaatcagcagagtggaggctgaggatttgggagtttattattgctggcaaggtacacattttcctcagacgttcggtggaggcaccaagctggaaatcaaaacaacaacccctgcccccagacctcctaccccagcccctacaattgccagccagcctctgagcctgaggcccgaggcttgtagacctgctgctggcggagccgtgcacaccagaggactggatttcgcctgcgacatctacatctgggcgcccttggccgggacttgtggggtccttctcctgtcactggttatcaccctttactgcaaacggggcagaaagaaactcctgtatatattcaaacaaccatttatgagaccagtacaaactactcaagaggaagatggctgtagctgccgatttccagaagaagaagaaggaggatgtgaactgagagtgaagttcagcaggagcgcagacgcccccgcgtacaagcagggccagaaccagctctataacgagctcaatctaggacgaagagaggagtacgatgttttggacaagagacgtggccgggaccctgagatggggggaaagccgagaaggaagaaccctcaggaaggcctgttcaatgaactgcagaaagataagatggcggaggccttcagtgagattgggatgaaaggcgagcgccggaggggcaaggggcacgatggccttttccagggtctcagtacagccaccaaggacaccttcgacgcccttcacatgcaggccctgccccctcgctgataa

SEQ ID NO: 1611 - protein, 490 aa, Artificial Sequence
  mu25E6CAR T841BB3z1XX
MALPVTALLLPLALLLHAARPEVQLVESGGDLVKPGGSLKLSCAASGFTFSSYGMSWVRQTPDKRLEWVATISNGGRHTFYPDSVKGRFTISRDNAKNTLYLQMSSLKSEDTAMYLCVRQTGTEGWFAYWGQGTLVTVSAGGGGSGGGGSGGGGSDVVMTQTPLTLSVTIGQPASISCKSSQSLLDSDGKTYLNWLLQRPGQSPKRLIYLVSKLDSGVPDRFTGSGSGTDFTLKISRVEAEDLGVYYCWQGTHFPQTFGGGTKLEIKTTTPAPRPPTPAPTIASQPLSLRPEACRPAAGGAVHTRGLDFACDIYIWAPLAGTCGVLLLSLVITLYCKRGRKKLLYIFKQPFMRPVQTTQEEDGCSCRFPEEEEGGCELRVKFSRSADAPAYKQGQNQLYNELNLGRREEYDVLDKRRGRDPEMGGKPRRKNPQEGLFNELQKDKMAEAFSEIGMKGERRRGKGHDGLFQGLSTATKDTFDALHMQALPPR

SEQ ID NO: 1612 - DNA, 1476 bp, Artificial Sequence
  hu25E6CAR T841BB3z1XX
atggccttaccagtgaccgccttgctcctgccgctggccttgctgctccacgccgccaggccggaggtgcagctggtggaatctggcggaggactggtcaagcctggaggcagcctgagactgagctgcgccgccagcggcttcacattcagcagctacggcatgagctgggtgcggcaggcccctggcaagggcctggaatgggtcagcaccatcagcaacggcggaagacacaccttctaccccgacagcgtgaagggcagattcaccatctcaagagataacgccaagaacagcctgtacctgcagatgaacagcctgcgggccgaggacaccgccgtgtactactgcgccagacagaccggcacagagggctggttcgcctactggggccagggcaccctggtgaccgtgtccagcggcggtggcggaagcggaggcggtggctccggtggcggaggcagcgacatcgtgatgacccagacccctctgtctctgagcgtgacccctggccagcctgccagcatctcttgtaaaagcagccagagcctgctggacagcgacggcaagacctacctgaactggtacctgcagaagcccggccaaagccctcagctgctgatctacctggtgtccaagctggatagcggtgttcctgatagattcagcggatctggcagcggcaccgacttcaccctgaagatcagcagagtggaagccgaggacgtgggcgtgtactactgctggcagggcacacacttcccccagacattcggccagggcaccaaggtggaaatcaagacaacaacccctgcccccagacctcctaccccagcccctacaattgccagccagcctctgagcctgaggcccgaggcttgtagacctgctgctggcggagccgtgcacaccagaggactggatttcgcctgcgacatctacatctgggcgcccttggccgggacttgtggggtccttctcctgtcactggttatcaccctttactgcaaacggggcagaaagaaactcctgtatatattcaaacaaccatttatgagaccagtacaaactactcaagaggaagatggctgtagctgccgatttccagaagaagaagaaggaggatgtgaactgagagtgaagttcagcaggagcgcagacgcccccgcgtacaagcagggccagaaccagctctataacgagctcaatctaggacgaagagaggagtacgatgttttggacaagagacgtggccgggaccctgagatggggggaaagccgagaaggaagaaccctcaggaaggcctgttcaatgaactgcagaaagataagatggcggaggccttcagtgagattgggatgaaaggcgagcgccggaggggcaaggggcacgatggccttttccagggtctcagtacagccaccaaggacaccttcgacgcccttcacatgcaggccctgccccctcgctgataa

SEQ ID NO: 1613 - protein, 490 aa, Artificial Sequence
  hu25E6CAR T841BB3z1XX
MALPVTALLLPLALLLHAARPEVQLVESGGGLVKPGGSLRLSCAASGFTFSSYGMSWVRQAPGKGLEWVSTISNGGRHTFYPDSVKGRFTISRDNAKNSLYLQMNSLRAEDTAVYYCARQTGTEGWFAYWGQGTLVTVSSGGGGSGGGGSGGGGSDIVMTQTPLSLSVTPGQPASISCKSSQSLLDSDGKTYLNWYLQKPGQSPQLLIYLVSKLDSGVPDRFSGSGSGTDFTLKISRVEAEDVGVYYCWQGTHFPQTFGQGTKVEIKTTTPAPRPPTPAPTIASQPLSLRPEACRPAAGGAVHTRGLDFACDIYIWAPLAGTCGVLLLSLVITLYCKRGRKKLLYIFKQPFMRPVQTTQEEDGCSCRFPEEEEGGCELRVKFSRSADAPAYKQGQNQLYNELNLGRREEYDVLDKRRGRDPEMGGKPRRKNPQEGLFNELQKDKMAEAFSEIGMKGERRRGKGHDGLFQGLSTATKDTFDALHMQALPPR

SEQ ID NO: 1614 - DNA, 1473 bp, Artificial Sequence
  mu25E6CAR T8283z1XX
atggccttaccagtgaccgccttgctcctgccgctggccttgctgctccacgccgccaggccggaggtgcagctggtggagtctgggggagacttagtgaagcctggagggtccctgaaactctcctgtgcagcctctggtttcactttcagtagttatggaatgtcttgggttcgccagactccagacaagaggctggagtgggtcgcaaccattagtaatggtggtagacacaccttctatccagacagtgtgaaggggcgattcaccatctccagagacaatgccaagaacaccctgtatctgcaaatgagcagtctgaagtctgaggacacagccatgtatttatgtgtaagacagactgggacggagggctggtttgcttactggggccaagggactctggtcactgtctctgcaggtggcggaggatctggcggaggtggaagcggcggaggcggatccgatgttgtgatgacccagactccactcactttgtcggttaccattggacaaccagcctccatctcttgcaagtcaagtcagagcctcttagatagtgatggaaagacatatttgaattggttgttacagaggccaggccagtctccaaagcgcctaatctatctggtgtctaaactggactctggagtccctgacaggttcactggcagtggatcagggacagatttcacactgaaaatcagcagagtggaggctgaggatttgggagtttattattgctggcaaggtacacattttcctcagacgttcggtggaggcaccaagctggaaatcaaaacaacaacccctgcccccagacctcctaccccagcccctacaattgccagccagcctctgagcctgaggcccgaggcttgtagacctgctgctggcggagccgtgcacaccagaggactggatttcgcctgcgacatctacatctgggcgcccttggccgggacttgtggggtccttctcctgtcactggttatcaccctttactgcaggagtaagaggagcaggctcctgcacagtgactacatgaacatgactcctagaagacctgggcctaccagaaagcattaccagccctatgccccaccacgcgacttcgcagcctatcgctccagagtgaagttcagcaggagcgcagacgcccccgcgtacaagcagggccagaaccagctctataacgagctcaatctaggacgaagagaggagtacgatgttttggacaagagacgtggccgggaccctgagatggggggaaagccgagaaggaagaaccctcaggaaggcctgttcaatgaactgcagaaagataagatggcggaggccttcagtgagattgggatgaaaggcgagcgccggaggggcaaggggcacgatggccttttccagggtctcagtacagccaccaaggacaccttcgacgcccttcacatgcaggccctgccccctcgctgataa

SEQ ID NO: 1615 - protein, 489 aa, Artificial Sequence
  mu25E6CAR T8283z1XX
MALPVTALLLPLALLLHAARPEVQLVESGGDLVKPGGSLKLSCAASGFTFSSYGMSWVRQTPDKRLEWVATISNGGRHTFYPDSVKGRFTISRDNAKNTLYLQMSSLKSEDTAMYLCVRQTGTEGWFAYWGQGTLVTVSAGGGGSGGGGSGGGGSDVVMTQTPLTLSVTIGQPASISCKSSQSLLDSDGKTYLNWLLQRPGQSPKRLIYLVSKLDSGVPDRFTGSGSGTDFTLKISRVEAEDLGVYYCWQGTHFPQTFGGGTKLEIKTTTPAPRPPTPAPTIASQPLSLRPEACRPAAGGAVHTRGLDFACDIYIWAPLAGTCGVLLLSLVITLYCRSKRSRLLHSDYMNMTPRRPGPTRKHYQPYAPPRDFAAYRSRVKFSRSADAPAYKQGQNQLYNELNLGRREEYDVLDKRRGRDPEMGGKPRRKNPQEGLFNELQKDKMAEAFSEIGMKGERRRGKGHDGLFQGLSTATKDTFDALHMQALPPR

SEQ ID NO: 1616 - DNA, 1473 bp, Artificial Sequence
  hu25E6CAR T8283z1XX
atggccttaccagtgaccgccttgctcctgccgctggccttgctgctccacgccgccaggccggaggtgcagctggtggaatctggcggaggactggtcaagcctggaggcagcctgagactgagctgcgccgccagcggcttcacattcagcagctacggcatgagctgggtgcggcaggcccctggcaagggcctggaatgggtcagcaccatcagcaacggcggaagacacaccttctaccccgacagcgtgaagggcagattcaccatctcaagagataacgccaagaacagcctgtacctgcagatgaacagcctgcgggccgaggacaccgccgtgtactactgcgccagacagaccggcacagagggctggttcgcctactggggccagggcaccctggtgaccgtgtccagcggcggtggcggaagcggaggcggtggctccggtggcggaggcagcgacatcgtgatgacccagacccctctgtctctgagcgtgacccctggccagcctgccagcatctcttgtaaaagcagccagagcctgctggacagcgacggcaagacctacctgaactggtacctgcagaagcccggccaaagccctcagctgctgatctacctggtgtccaagctggatagcggtgttcctgatagattcagcggatctggcagcggcaccgacttcaccctgaagatcagcagagtggaagccgaggacgtgggcgtgtactactgctggcagggcacacacttcccccagacattcggccagggcaccaaggtggaaatcaagacaacaacccctgcccccagacctcctaccccagcccctacaattgccagccagcctctgagcctgaggcccgaggcttgtagacctgctgctggcggagccgtgcacaccagaggactggatttcgcctgcgacatctacatctgggcgcccttggccgggacttgtggggtccttctcctgtcactggttatcaccctttactgcaggagtaagaggagcaggctcctgcacagtgactacatgaacatgactcctagaagacctgggcctaccagaaagcattaccagccctatgccccaccacgcgacttcgcagcctatcgctccagagtgaagttcagcaggagcgcagacgcccccgcgtacaagcagggccagaaccagctctataacgagctcaatctaggacgaagagaggagtacgatgttttggacaagagacgtggccgggaccctgagatggggggaaagccgagaaggaagaaccctcaggaaggcctgttcaatgaactgcagaaagataagatggcggaggccttcagtgagattgggatgaaaggcgagcgccggaggggcaaggggcacgatggccttttccagggtctcagtacagccaccaaggacaccttcgacgcccttcacatgcaggccctgccccctcgctgataa

SEQ ID NO: 1617 - protein, 489 aa, Artificial Sequence
  hu25E6CAR T8283z1XX
MALPVTALLLPLALLLHAARPEVQLVESGGGLVKPGGSLRLSCAASGFTFSSYGMSWVRQAPGKGLEWVSTISNGGRHTFYPDSVKGRFTISRDNAKNSLYLQMNSLRAEDTAVYYCARQTGTEGWFAYWGQGTLVTVSSGGGGSGGGGSGGGGSDIVMTQTPLSLSVTPGQPASISCKSSQSLLDSDGKTYLNWYLQKPGQSPQLLIYLVSKLDSGVPDRFSGSGSGTDFTLKISRVEAEDVGVYYCWQGTHFPQTFGQGTKVEIKTTTPAPRPPTPAPTIASQPLSLRPEACRPAAGGAVHTRGLDFACDIYIWAPLAGTCGVLLLSLVITLYCRSKRSRLLHSDYMNMTPRRPGPTRKHYQPYAPPRDFAAYRSRVKFSRSADAPAYKQGQNQLYNELNLGRREEYDVLDKRRGRDPEMGGKPRRKNPQEGLFNELQKDKMAEAFSEIGMKGERRRGKGHDGLFQGLSTATKDTFDALHMQALPPR

SEQ ID NO: 1618 - DNA, 1533 bp, Artificial Sequence
  MNC21XX - muMNC2CAR T841BB3z1XX
atggccttaccagtgaccgccttgctcctgccgctggccttgctgctccacgccgccaggccggaggtccagctggaggagtcagggggaggcttagtgaagcctggagggtccctgaaactctcctgtgcagcctctggattcactttcagtggctatgccatgtcttgggttcgccagactccggagaagaggctggagtgggtcgcaaccattagtagtggtggtacttatatctactatccagacagtgtgaaggggcgattcaccatctccagagacaatgccaagaacaccctgtacctgcaaatgagcagtctgaggtctgaggacacggccatgtattactgtgcaagacttgggggggataattactacgaatacttcgatgtctggggcgcagggaccacggtcaccgtctcctccgccaaaacgacacccccatctgtctatggcggtggcggatccggcggtggcggatccggcggtggcggatccgacattgtgatcacacagtctacagcttccttaggtgtatctctggggcagagggccaccatctcatgcagggccagcaaaagtgtcagtacatctggctatagttatatgcactggtaccaacagagaccaggacagccacccaaactcctcatctatcttgcatccaacctagaatctggggtccctgccaggttcagtggcagtgggtctgggacagacttcaccctcaacatccatcctgtggaggaggaggatgctgcaacctattactgtcagcacagtagggagcttccgttcacgttcggaggggggaccaagctggagataaaacgggctgatgctgcaccaactgtatccacaacaacccctgcccccagacctcctaccccagcccctacaattgccagccagcctctgagcctgaggcccgaggcttgtagacctgctgctggcggagccgtgcacaccagaggactggatttcgcctgcgacatctacatctgggcgcccttggccgggacttgtggggtccttctcctgtcactggttatcaccctttactgcaaacggggcagaaagaaactcctgtatatattcaaacaaccatttatgagaccagtacaaactactcaagaggaagatggctgtagctgccgatttccagaagaagaagaaggaggatgtgaactgagagtgaagttcagcaggagcgcagacgcccccgcgtacaagcagggccagaaccagctctataacgagctcaatctaggacgaagagaggagtacgatgttttggacaagagacgtggccgggaccctgagatggggggaaagccgagaaggaagaaccctcaggaaggcctgttcaatgaactgcagaaagataagatggcggaggccttcagtgagattgggatgaaaggcgagcgccggaggggcaaggggcacgatggccttttccagggtctcagtacagccaccaaggacaccttcgacgcccttcacatgcaggccctgccccctcgctgataa

SEQ ID NO: 1619 - protein, 509 aa, Artificial Sequence
  MNC21XX - muMNC2CAR T841BB3z1XX
MALPVTALLLPLALLLHAARPEVQLEESGGGLVKPGGSLKLSCAASGFTFSGYAMSWVRQTPEKRLEWVATISSGGTYIYYPDSVKGRFTISRDNAKNTLYLQMSSLRSEDTAMYYCARLGGDNYYEYFDVWGAGTTVTVSSAKTTPPSVYGGGGSGGGGSGGGGSDIVITQSTASLGVSLGQRATISCRASKSVSTSGYSYMHWYQQRPGQPPKLLIYLASNLESGVPARFSGSGSGTDFTLNIHPVEEEDAATYYCQHSRELPFTFGGGTKLEIKRADAAPTVSTTTPAPRPPTPAPTIASQPLSLRPEACRPAAGGAVHTRGLDFACDIYIWAPLAGTCGVLLLSLVITLYCKRGRKKLLYIFKQPFMRPVQTTQEEDGCSCRFPEEEEGGCELRVKFSRSADAPAYKQGQNQLYNELNLGRREEYDVLDKRRGRDPEMGGKPRRKNPQEGLFNELQKDKMAEAFSEIGMKGERRRGKGHDGLFQGLSTATKDTFDALHMQALPPR

SEQ ID NO: 1620 - DNA, 1485 bp, Artificial Sequence
  huMNC2CAR T841BB3z1XX
atggccttaccagtgaccgccttgctcctgccgctggccttgctgctccacgccgccaggccggaggtgcagctggtggagtctgggggaggcctggtcaagcctggggggtccctgagactctcctgtgcagcctctggattcaccttcagtggctatgccatgagctgggtccgccaggctccagggaaggggctggagtgggtctcaaccattagtagtggcggaacctacatatactaccccgactcagtgaagggccgattcaccatctccagagacaacgccaagaactcactgtatctgcaaatgaacagcctgagagccgaggacacggccgtgtattactgtgcgagacttgggggggataattactacgaatacttcgatgtctggggcaaagggaccacggtcaccgtctcctccggcggtggcggatccggcggtggcggatccggcggtggcggatccgacattgtgctgacccagtctccagcctccttggccgtgtctccaggacagagggccaccatcacctgcagagccagtaagagtgtcagtaccagcggatactcctacatgcactggtatcagcagaaaccaggacaacctcctaaactcctgatttacctggcatccaatctggagagcggggtcccagccaggttcagcggcagtgggtctgggaccgatttcaccctcacaattaatcctgtggaagctaatgatactgcaaattattactgtcagcacagtagggagctgcctttcacattcggcggagggaccaaggtggagatcaaacgaactacaacaacccctgcccccagacctcctaccccagcccctacaattgccagccagcctctgagcctgaggcccgaggcttgtagacctgctgctggcggagccgtgcacaccagaggactggatttcgcctgcgacatctacatctgggcgcccttggccgggacttgtggggtccttctcctgtcactggttatcaccctttactgcaaacggggcagaaagaaactcctgtatatattcaaacaaccatttatgagaccagtacaaactactcaagaggaagatggctgtagctgccgatttccagaagaagaagaaggaggatgtgaactgagagtgaagttcagcaggagcgcagacgcccccgcgtacaagcagggccagaaccagctctataacgagctcaatctaggacgaagagaggagtacgatgttttggacaagagacgtggccgggaccctgagatggggggaaagccgagaaggaagaaccctcaggaaggcctgttcaatgaactgcagaaagataagatggcggaggccttcagtgagattgggatgaaaggcgagcgccggaggggcaaggggcacgatggccttttccagggtctcagtacagccaccaaggacaccttcgacgcccttcacatgcaggccctgccccctcgctgataa

SEQ ID NO: 1621 - protein, 493 aa, Artificial Sequence
  huMNC2CAR T841BB3z1XX
MALPVTALLLPLALLLHAARPEVQLVESGGGLVKPGGSLRLSCAASGFTFSGYAMSWVRQAPGKGLEWVSTISSGGTYIYYPDSVKGRFTISRDNAKNSLYLQMNSLRAEDTAVYYCARLGGDNYYEYFDVWGKGTTVTVSSGGGGSGGGGSGGGGSDIVLTQSPASLAVSPGQRATITCRASKSVSTSGYSYMHWYQQKPGQPPKLLIYLASNLESGVPARFSGSGSGTDFTLTINPVEANDTANYYCQHSRELPFTFGGGTKVEIKRTTTTPAPRPPTPAPTIASQPLSLRPEACRPAAGGAVHTRGLDFACDIYIWAPLAGTCGVLLLSLVITLYCKRGRKKLLYIFKQPFMRPVQTTQEEDGCSCRFPEEEEGGCELRVKFSRSADAPAYKQGQNQLYNELNLGRREEYDVLDKRRGRDPEMGGKPRRKNPQEGLFNELQKDKMAEAFSEIGMKGERRRGKGHDGLFQGLSTATKDTFDALHMQALPPR

SEQ ID NO: 1622 - DNA, 1530 bp, Artificial Sequence
  muMNC2CAR T8283z1XX
atggccttaccagtgaccgccttgctcctgccgctggccttgctgctccacgccgccaggccggaggtccagctggaggagtcagggggaggcttagtgaagcctggagggtccctgaaactctcctgtgcagcctctggattcactttcagtggctatgccatgtcttgggttcgccagactccggagaagaggctggagtgggtcgcaaccattagtagtggtggtacttatatctactatccagacagtgtgaaggggcgattcaccatctccagagacaatgccaagaacaccctgtacctgcaaatgagcagtctgaggtctgaggacacggccatgtattactgtgcaagacttgggggggataattactacgaatacttcgatgtctggggcgcagggaccacggtcaccgtctcctccgccaaaacgacacccccatctgtctatggcggtggcggatccggcggtggcggatccggcggtggcggatccgacattgtgatcacacagtctacagcttccttaggtgtatctctggggcagagggccaccatctcatgcagggccagcaaaagtgtcagtacatctggctatagttatatgcactggtaccaacagagaccaggacagccacccaaactcctcatctatcttgcatccaacctagaatctggggtccctgccaggttcagtggcagtgggtctgggacagacttcaccctcaacatccatcctgtggaggaggaggatgctgcaacctattactgtcagcacagtagggagcttccgttcacgttcggaggggggaccaagctggagataaaacgggctgatgctgcaccaactgtatccacaacaacccctgcccccagacctcctaccccagcccctacaattgccagccagcctctgagcctgaggcccgaggcttgtagacctgctgctggcggagccgtgcacaccagaggactggatttcgcctgcgacatctacatctgggcgcccttggccgggacttgtggggtccttctcctgtcactggttatcaccctttactgcaggagtaagaggagcaggctcctgcacagtgactacatgaacatgactcctagaagacctgggcctaccagaaagcattaccagccctatgccccaccacgcgacttcgcagcctatcgctccagagtgaagttcagcaggagcgcagacgcccccgcgtacaagcagggccagaaccagctctataacgagctcaatctaggacgaagagaggagtacgatgttttggacaagagacgtggccgggaccctgagatggggggaaagccgagaaggaagaaccctcaggaaggcctgttcaatgaactgcagaaagataagatggcggaggccttcagtgagattgggatgaaaggcgagcgccggaggggcaaggggcacgatggccttttccagggtctcagtacagccaccaaggacaccttcgacgcccttcacatgcaggccctgccccctcgctgataa

SEQ ID NO: 1623 - protein, 508 aa, Artificial Sequence
  muMNC2CAR T8283z1XX
MALPVTALLLPLALLLHAARPEVQLEESGGGLVKPGGSLKLSCAASGFTFSGYAMSWVRQTPEKRLEWVATISSGGTYIYYPDSVKGRFTISRDNAKNTLYLQMSSLRSEDTAMYYCARLGGDNYYEYFDVWGAGTTVTVSSAKTTPPSVYGGGGSGGGGSGGGGSDIVITQSTASLGVSLGQRATISCRASKSVSTSGYSYMHWYQQRPGQPPKLLIYLASNLESGVPARFSGSGSGTDFTLNIHPVEEEDAATYYCQHSRELPFTFGGGTKLEIKRADAAPTVSTTTPAPRPPTPAPTIASQPLSLRPEACRPAAGGAVHTRGLDFACDIYIWAPLAGTCGVLLLSLVITLYCRSKRSRLLHSDYMNMTPRRPGPTRKHYQPYAPPRDFAAYRSRVKFSRSADAPAYKQGQNQLYNELNLGRREEYDVLDKRRGRDPEMGGKPRRKNPQEGLFNELQKDKMAEAFSEIGMKGERRRGKGHDGLFQGLSTATKDTFDALHMQALPPR

SEQ ID NO: 1624 - DNA, 1482 bp, Artificial Sequence
  huMNC2CAR T8283z1XX
atggccttaccagtgaccgccttgctcctgccgctggccttgctgctccacgccgccaggccggaggtgcagctggtggagtctgggggaggcctggtcaagcctggggggtccctgagactctcctgtgcagcctctggattcaccttcagtggctatgccatgagctgggtccgccaggctccagggaaggggctggagtgggtctcaaccattagtagtggcggaacctacatatactaccccgactcagtgaagggccgattcaccatctccagagacaacgccaagaactcactgtatctgcaaatgaacagcctgagagccgaggacacggccgtgtattactgtgcgagacttgggggggataattactacgaatacttcgatgtctggggcaaagggaccacggtcaccgtctcctccggcggtggcggatccggcggtggcggatccggcggtggcggatccgacattgtgctgacccagtctccagcctccttggccgtgtctccaggacagagggccaccatcacctgcagagccagtaagagtgtcagtaccagcggatactcctacatgcactggtatcagcagaaaccaggacaacctcctaaactcctgatttacctggcatccaatctggagagcggggtcccagccaggttcagcggcagtgggtctgggaccgatttcaccctcacaattaatcctgtggaagctaatgatactgcaaattattactgtcagcacagtagggagctgcctttcacattcggcggagggaccaaggtggagatcaaacgaactacaacaacccctgcccccagacctcctaccccagcccctacaattgccagccagcctctgagcctgaggcccgaggcttgtagacctgctgctggcggagccgtgcacaccagaggactggatttcgcctgcgacatctacatctgggcgcccttggccgggacttgtggggtccttctcctgtcactggttatcaccctttactgcaggagtaagaggagcaggctcctgcacagtgactacatgaacatgactcctagaagacctgggcctaccagaaagcattaccagccctatgccccaccacgcgacttcgcagcctatcgctccagagtgaagttcagcaggagcgcagacgcccccgcgtacaagcagggccagaaccagctctataacgagctcaatctaggacgaagagaggagtacgatgttttggacaagagacgtggccgggaccctgagatggggggaaagccgagaaggaagaaccctcaggaaggcctgttcaatgaactgcagaaagataagatggcggaggccttcagtgagattgggatgaaaggcgagcgccggaggggcaaggggcacgatggccttttccagggtctcagtacagccaccaaggacaccttcgacgcccttcacatgcaggccctgccccctcgctgataa

SEQ ID NO: 1625 - protein, 492 aa, Artificial Sequence
  huMNC2CAR T8283z1XX
MALPVTALLLPLALLLHAARPEVQLVESGGGLVKPGGSLRLSCAASGFTFSGYAMSWVRQAPGKGLEWVSTISSGGTYIYYPDSVKGRFTISRDNAKNSLYLQMNSLRAEDTAVYYCARLGGDNYYEYFDVWGKGTTVTVSSGGGGSGGGGSGGGGSDIVLTQSPASLAVSPGQRATITCRASKSVSTSGYSYMHWYQQKPGQPPKLLIYLASNLESGVPARFSGSGSGTDFTLTINPVEANDTANYYCQHSRELPFTFGGGTKVEIKRTTTTPAPRPPTPAPTIASQPLSLRPEACRPAAGGAVHTRGLDFACDIYIWAPLAGTCGVLLLSLVITLYCRSKRSRLLHSDYMNMTPRRPGPTRKHYQPYAPPRDFAAYRSRVKFSRSADAPAYKQGQNQLYNELNLGRREEYDVLDKRRGRDPEMGGKPRRKNPQEGLFNELQKDKMAEAFSEIGMKGERRRGKGHDGLFQGLSTATKDTFDALHMQALPPR

SEQ ID NO: 1626 - DNA, 1467 bp, Artificial Sequence
  MNE61XX - muMNE6CAR T841BB3z1XX
atggccttaccagtgaccgccttgctcctgccgctggccttgctgctccacgccgccaggccggaggtgaaggtggtggagtctgggggagacttagtgaagcctggagggtccctgaaactctcctgtgtagtctctggattcactttcagtagatatggcatgtcttgggttcgccagactccaggcaagaggctggagtgggtcgcaaccattagtggtggcggtacttacatctactatccagacagtgtgaaggggcgattcaccatctccagagacaatgccaagaacaccctgtacctgcaaatgagcagtctgaagtctgaggacacagccatgtatcactgtacaagggataactacggtaggaactacgactacggtatggactactggggtcaaggaacctcagtcaccgtctcctcaggcggtggcggatccggcggtggcggatccggcggtggcggatcccaaattgttctcacccagtctccagcaatcatgtctgcatctccaggggaggaggtcaccctaacctgcagtgccacctcaagtgtaagttacatacactggttccagcagaggccaggcacttctcccaaactctggatttatagcacatccaacctggcttctggagtccctgttcgcttcagtggcagtggatatgggacctcttactctctcacaatcagccgaatggaggctgaagatgctgccacttattactgccagcaaaggagtagttccccattcacgttcggctcggggacaaagttggaaataaaaacaacaacccctgcccccagacctcctaccccagcccctacaattgccagccagcctctgagcctgaggcccgaggcttgtagacctgctgctggcggagccgtgcacaccagaggactggatttcgcctgcgacatctacatctgggcgcccttggccgggacttgtggggtccttctcctgtcactggttatcaccctttactgcaaacggggcagaaagaaactcctgtatatattcaaacaaccatttatgagaccagtacaaactactcaagaggaagatggctgtagctgccgatttccagaagaagaagaaggaggatgtgaactgagagtgaagttcagcaggagcgcagacgcccccgcgtacaagcagggccagaaccagctctataacgagctcaatctaggacgaagagaggagtacgatgttttggacaagagacgtggccgggaccctgagatggggggaaagccgagaaggaagaaccctcaggaaggcctgttcaatgaactgcagaaagataagatggcggaggccttcagtgagattgggatgaaaggcgagcgccggaggggcaaggggcacgatggccttttccagggtctcagtacagccaccaaggacaccttcgacgcccttcacatgcaggccctgccccctcgctgataa

SEQ ID NO: 1627 - protein, 487 aa, Artificial Sequence
  MNE61XX - muMNE6CAR T841BB3z1XX
MALPVTALLLPLALLLHAARPEVKVVESGGDLVKPGGSLKLSCVVSGFTFSRYGMSWVRQTPGKRLEWVATISGGGTYIYYPDSVKGRFTISRDNAKNTLYLQMSSLKSEDTAMYHCTRDNYGRNYDYGMDYWGQGTSVTVSSGGGGSGGGGSGGGGSQIVLTQSPAIMSASPGEEVTLTCSATSSVSYIHWFQQRPGTSPKLWIYSTSNLASGVPVRFSGSGYGTSYSLTISRMEAEDAATYYCQQRSSSPFTFGSGTKLEIKTTTPAPRPPTPAPTIASQPLSLRPEACRPAAGGAVHTRGLDFACDIYIWAPLAGTCGVLLLSLVITLYCKRGRKKLLYIFKQPFMRPVQTTQEEDGCSCRFPEEEEGGCELRVKFSRSADAPAYKQGQNQLYNELNLGRREEYDVLDKRRGRDPEMGGKPRRKNPQEGLFNELQKDKMAEAFSEIGMKGERRRGKGHDGLFQGLSTATKDTFDALHMQALPPR

SEQ ID NO: 1628 - DNA, 1467 bp, Artificial Sequence
  huMNE6CAR T841BB3z1XX
atggccttaccagtgaccgccttgctcctgccgctggccttgctgctccacgccgccaggccggaggtgcagctggtggagtctgggggaggcctggtcaagcctggggggtccctgagactctcctgtgcagcctctggattcaccttcagtaggtatggcatgagctgggtccgccaggctccagggaagaggctggagtgggtctcaaccattagtggcggaggcacctacatatactacccagactcagtgaagggccgattcaccatctccagagacaacgccaagaacaccctgtatctgcaaatgaacagcctgagagccgaggacacggctgtgtattactgtaccagagataactatggccgcaactatgattatggcatggattattggggccagggcaccctggtgaccgtgagcagcggcggtggcggatccggcggtggcggatccggcggtggcggatccgaaattgtgttgacacagtctccagccaccctgtctttgtctccaggggaaagagccaccctcacctgcagcgccaccagcagtgttagctacatccactggtaccaacagaggcctggccagagccccaggctcctcatctatagcacctccaacctggccagcggcatcccagccaggttcagtggcagtgggtctgggagcgactacactctcaccatcagcagcctagagcctgaagattttgcagtttattactgtcagcagcgtagcagctcccctttcacctttggcagcggcaccaaagtggaaattaaaacaacaacccctgcccccagacctcctaccccagcccctacaattgccagccagcctctgagcctgaggcccgaggcttgtagacctgctgctggcggagccgtgcacaccagaggactggatttcgcctgcgacatctacatctgggcgcccttggccgggacttgtggggtccttctcctgtcactggttatcaccctttactgcaaacggggcagaaagaaactcctgtatatattcaaacaaccatttatgagaccagtacaaactactcaagaggaagatggctgtagctgccgatttccagaagaagaagaaggaggatgtgaactgagagtgaagttcagcaggagcgcagacgcccccgcgtacaagcagggccagaaccagctctataacgagctcaatctaggacgaagagaggagtacgatgttttggacaagagacgtggccgggaccctgagatggggggaaagccgagaaggaagaaccctcaggaaggcctgttcaatgaactgcagaaagataagatggcggaggccttcagtgagattgggatgaaaggcgagcgccggaggggcaaggggcacgatggccttttccagggtctcagtacagccaccaaggacaccttcgacgcccttcacatgcaggccctgccccctcgctgataa

SEQ ID NO: 1629 - protein, 487 aa, Artificial Sequence
  huMNE6CAR T841BB3z1XX
MALPVTALLLPLALLLHAARPEVQLVESGGGLVKPGGSLRLSCAASGFTFSRYGMSWVRQAPGKRLEWVSTISGGGTYIYYPDSVKGRFTISRDNAKNTLYLQMNSLRAEDTAVYYCTRDNYGRNYDYGMDYWGQGTLVTVSSGGGGSGGGGSGGGGSEIVLTQSPATLSLSPGERATLTCSATSSVSYIHWYQQRPGQSPRLLIYSTSNLASGIPARFSGSGSGSDYTLTISSLEPEDFAVYYCQQRSSSPFTFGSGTKVEIKTTTPAPRPPTPAPTIASQPLSLRPEACRPAAGGAVHTRGLDFACDIYIWAPLAGTCGVLLLSLVITLYCKRGRKKLLYIFKQPFMRPVQTTQEEDGCSCRFPEEEEGGCELRVKFSRSADAPAYKQGQNQLYNELNLGRREEYDVLDKRRGRDPEMGGKPRRKNPQEGLFNELQKDKMAEAFSEIGMKGERRRGKGHDGLFQGLSTATKDTFDALHMQALPPR

SEQ ID NO: 1630 - DNA, 1464 bp, Artificial Sequence
  muMNE6CAR T84283z1XX
atggccttaccagtgaccgccttgctcctgccgctggccttgctgctccacgccgccaggccggaggtgaaggtggtggagtctgggggagacttagtgaagcctggagggtccctgaaactctcctgtgtagtctctggattcactttcagtagatatggcatgtcttgggttcgccagactccaggcaagaggctggagtgggtcgcaaccattagtggtggcggtacttacatctactatccagacagtgtgaaggggcgattcaccatctccagagacaatgccaagaacaccctgtacctgcaaatgagcagtctgaagtctgaggacacagccatgtatcactgtacaagggataactacggtaggaactacgactacggtatggactactggggtcaaggaacctcagtcaccgtctcctcaggcggtggcggatccggcggtggcggatccggcggtggcggatcccaaattgttctcacccagtctccagcaatcatgtctgcatctccaggggaggaggtcaccctaacctgcagtgccacctcaagtgtaagttacatacactggttccagcagaggccaggcacttctcccaaactctggatttatagcacatccaacctggcttctggagtccctgttcgcttcagtggcagtggatatgggacctcttactctctcacaatcagccgaatggaggctgaagatgctgccacttattactgccagcaaaggagtagttccccattcacgttcggctcggggacaaagttggaaataaaaacaacaacccctgcccccagacctcctaccccagcccctacaattgccagccagcctctgagcctgaggcccgaggcttgtagacctgctgctggcggagccgtgcacaccagaggactggatttcgcctgcgacatctacatctgggcgcccttggccgggacttgtggggtccttctcctgtcactggttatcaccctttactgcaggagtaagaggagcaggctcctgcacagtgactacatgaacatgactcctagaagacctgggcctaccagaaagcattaccagccctatgccccaccacgcgacttcgcagcctatcgctccagagtgaagttcagcaggagcgcagacgcccccgcgtacaagcagggccagaaccagctctataacgagctcaatctaggacgaagagaggagtacgatgttttggacaagagacgtggccgggaccctgagatggggggaaagccgagaaggaagaaccctcaggaaggcctgttcaatgaactgcagaaagataagatggcggaggccttcagtgagattgggatgaaaggcgagcgccggaggggcaaggggcacgatggccttttccagggtctcagtacagccaccaaggacaccttcgacgcccttcacatgcaggccctgccccctcgctgataa

SEQ ID NO: 1631 - protein, 486 aa, Artificial Sequence
  muMNE6CAR T84283z1XX
MALPVTALLLPLALLLHAARPEVKVVESGGDLVKPGGSLKLSCVVSGFTFSRYGMSWVRQTPGKRLEWVATISGGGTYIYYPDSVKGRFTISRDNAKNTLYLQMSSLKSEDTAMYHCTRDNYGRNYDYGMDYWGQGTSVTVSSGGGGSGGGGSGGGGSQIVLTQSPAIMSASPGEEVTLTCSATSSVSYIHWFQQRPGTSPKLWIYSTSNLASGVPVRFSGSGYGTSYSLTISRMEAEDAATYYCQQRSSSPFTFGSGTKLEIKTTTPAPRPPTPAPTIASQPLSLRPEACRPAAGGAVHTRGLDFACDIYIWAPLAGTCGVLLLSLVITLYCRSKRSRLLHSDYMNMTPRRPGPTRKHYQPYAPPRDFAAYRSRVKFSRSADAPAYKQGQNQLYNELNLGRREEYDVLDKRRGRDPEMGGKPRRKNPQEGLFNELQKDKMAEAFSEIGMKGERRRGKGHDGLFQGLSTATKDTFDALHMQALPPR

SEQ ID NO: 1632 - DNA, 1464 bp, Artificial Sequence
  huMNE6CAR T84283z1XX
atggccttaccagtgaccgccttgctcctgccgctggccttgctgctccacgccgccaggccggaggtgcagctggtggagtctgggggaggcctggtcaagcctggggggtccctgagactctcctgtgcagcctctggattcaccttcagtaggtatggcatgagctgggtccgccaggctccagggaagaggctggagtgggtctcaaccattagtggcggaggcacctacatatactacccagactcagtgaagggccgattcaccatctccagagacaacgccaagaacaccctgtatctgcaaatgaacagcctgagagccgaggacacggctgtgtattactgtaccagagataactatggccgcaactatgattatggcatggattattggggccagggcaccctggtgaccgtgagcagcggcggtggcggatccggcggtggcggatccggcggtggcggatccgaaattgtgttgacacagtctccagccaccctgtctttgtctccaggggaaagagccaccctcacctgcagcgccaccagcagtgttagctacatccactggtaccaacagaggcctggccagagccccaggctcctcatctatagcacctccaacctggccagcggcatcccagccaggttcagtggcagtgggtctgggagcgactacactctcaccatcagcagcctagagcctgaagattttgcagtttattactgtcagcagcgtagcagctcccctttcacctttggcagcggcaccaaagtggaaattaaaacaacaacccctgcccccagacctcctaccccagcccctacaattgccagccagcctctgagcctgaggcccgaggcttgtagacctgctgctggcggagccgtgcacaccagaggactggatttcgcctgcgacatctacatctgggcgcccttggccgggacttgtggggtccttctcctgtcactggttatcaccctttactgcaggagtaagaggagcaggctcctgcacagtgactacatgaacatgactcctagaagacctgggcctaccagaaagcattaccagccctatgccccaccacgcgacttcgcagcctatcgctccagagtgaagttcagcaggagcgcagacgcccccgcgtacaagcagggccagaaccagctctataacgagctcaatctaggacgaagagaggagtacgatgttttggacaagagacgtggccgggaccctgagatggggggaaagccgagaaggaagaaccctcaggaaggcctgttcaatgaactgcagaaagataagatggcggaggccttcagtgagattgggatgaaaggcgagcgccggaggggcaaggggcacgatggccttttccagggtctcagtacagccaccaaggacaccttcgacgcccttcacatgcaggccctgccccctcgctgataa

SEQ ID NO: 1633 - protein, 486 aa, Artificial Sequence
  huMNE6CAR T84283z1XX
MALPVTALLLPLALLLHAARPEVQLVESGGGLVKPGGSLRLSCAASGFTFSRYGMSWVRQAPGKRLEWVSTISGGGTYIYYPDSVKGRFTISRDNAKNTLYLQMNSLRAEDTAVYYCTRDNYGRNYDYGMDYWGQGTLVTVSSGGGGSGGGGSGGGGSEIVLTQSPATLSLSPGERATLTCSATSSVSYIHWYQQRPGQSPRLLIYSTSNLASGIPARFSGSGSGSDYTLTISSLEPEDFAVYYCQQRSSSPFTFGSGTKVEIKTTTPAPRPPTPAPTIASQPLSLRPEACRPAAGGAVHTRGLDFACDIYIWAPLAGTCGVLLLSLVITLYCRSKRSRLLHSDYMNMTPRRPGPTRKHYQPYAPPRDFAAYRSRVKFSRSADAPAYKQGQNQLYNELNLGRREEYDVLDKRRGRDPEMGGKPRRKNPQEGLFNELQKDKMAEAFSEIGMKGERRRGKGHDGLFQGLSTATKDTFDALHMQALPPR

SEQ ID NO: 1634 - DNA, 117 bp, Artificial Sequence
  Minimal CMV promoter (mCMV)
taggcgtgtacggtgggaggcctatataagcagagctcgtttagtgaaccgtcagatcgcctggagacgccatccacgctgttttgacctccatagaagacaccgggaccgatccag

SEQ ID NO: 1635 - DNA, 114 bp, Artificial Sequence
  Minimal IL2 promoter (mIL2P)
cattttgacacccccataatatttttccagaattaacagtataaattgcatctcttgttcaagagttccctatcactctctttaatcactactcacagtaacctcaactcctgc

SEQ ID NO: 1636 - DNA, 31 bp, Artificial Sequence
  Minimal promoter, miniP
agagggtatataatggaagctcgacttccag

SEQ ID NO: 1637 - DNA, 540 bp, Artificial Sequence
  IL18 activated
atggccttaccagtgaccgccttgctcctgccgctggccttgctgctccacgccgccaggccgtacttcggcaagctggaaagcaagctgagcgtgatccggaacctgaacgaccaggtgctgttcatcgatcagggcaacagacccctgttcgaggacatgaccgacagcgactgcagagacaacgcccctcggaccatcttcatcatcagcatgtacaaggacagccagcctagaggcatggccgtgaccatctctgtgaagtgcgagaagatcagcaccctgagctgcgagaacaagatcatcagcttcaaagagatgaacccgccggacaacatcaaggacaccaagagcgacatcatattcttccagcggagcgtgcccggccacgacaacaagatgcagtttgagagcagcagctacgagggctacttcctggcctgcgagaaagagcgggacctgttcaagctgatcctgaagaaagaggacgaactgggcgaccgcagcatcatgttcaccgtgcagaacgaggactgataa

SEQ ID NO: 1638 - protein, 178 aa, Artificial Sequence
  IL18 activated
MALPVTALLLPLALLLHAARPYFGKLESKLSVIRNLNDQVLFIDQGNRPLFEDMTDSDCRDNAPRTIFIISMYKDSQPRGMAVTISVKCEKISTLSCENKIISFKEMNPPDNIKDTKSDIIFFQRSVPGHDNKMQFESSSYEGYFLACEKERDLFKLILKKEDELGDRSIMFTVQNED

SEQ ID NO: 1639 - DNA, 770 bp, Artificial Sequence
  Foxp3NFATc1X3IL18
ggcttcattttttccatttactgcagaggcttcattttttccatttactgcagaggcttcattttttccatttactgcagaactagttaggcgtgtacggtgggaggcctatataagcagagctcgtttagtgaaccgtcagatcgcctggagacgccatccacgctgttttgacctccatagaagacaccgggaccgatccagcctcgagagacccaatgctagccaccatggccttaccagtgaccgccttgctcctgccgctggccttgctgctccacgccgccaggccgtacttcggcaagctggaaagcaagctgagcgtgatccggaacctgaacgaccaggtgctgttcatcgatcagggcaacagacccctgttcgaggacatgaccgacagcgactgcagagacaacgcccctcggaccatcttcatcatcagcatgtacaaggacagccagcctagaggcatggccgtgaccatctctgtgaagtgcgagaagatcagcaccctgagctgcgagaacaagatcatcagcttcaaagagatgaacccgccggacaacatcaaggacaccaagagcgacatcatattcttccagcggagcgtgcccggccacgacaacaagatgcagtttgagagcagcagctacgagggctacttcctggcctgcgagaaagagcgggacctgttcaagctgatcctgaagaaagaggacgaactgggcgaccgcagcatcatgttcaccgtgcagaacgaggactgataa

SEQ ID NO: 1640 - DNA, 850 bp, Artificial Sequence
  Foxp3NFATc1X6IL18
gcttcattttttccatttactgcagaggcttcattttttccatttactgcagaggcttcattttttccatttactgcagaggcttcattttttccatttactgcagaggcttcattttttccatttactgcagaggcttcattttttccatttactgcagaactagttaggcgtgtacggtgggaggcctatataagcagagctcgtttagtgaaccgtcagatcgcctggagacgccatccacgctgttttgacctccatagaagacaccgggaccgatccagcctcgagagacccaatgctagccaccatggccttaccagtgaccgccttgctcctgccgctggccttgctgctccacgccgccaggccgtacttcggcaagctggaaagcaagctgagcgtgatccggaacctgaacgaccaggtgctgttcatcgatcagggcaacagacccctgttcgaggacatgaccgacagcgactgcagagacaacgcccctcggaccatcttcatcatcagcatgtacaaggacagccagcctagaggcatggccgtgaccatctctgtgaagtgcgagaagatcagcaccctgagctgcgagaacaagatcatcagcttcaaagagatgaacccgccggacaacatcaaggacaccaagagcgacatcatattcttccagcggagcgtgcccggccacgacaacaagatgcagtttgagagcagcagctacgagggctacttcctggcctgcgagaaagagcgggacctgttcaagctgatcctgaagaaagaggacgaactgggcgaccgcagcatcatgttcaccgtgcagaacgaggactgataa

SEQ ID NO: 1641 - DNA, 779 bp, Artificial Sequence
  IL2NFATc1X3IL18
ggaggaaaaactgtttcatacagaaggcgtggaggaaaaactgtttcatacagaaggcgtggaggaaaaactgtttcatacagaaggcgtactagttaggcgtgtacggtgggaggcctatataagcagagctcgtttagtgaaccgtcagatcgcctggagacgccatccacgctgttttgacctccatagaagacaccgggaccgatccagcctcgagagacccaatgctagccaccatggccttaccagtgaccgccttgctcctgccgctggccttgctgctccacgccgccaggccgtacttcggcaagctggaaagcaagctgagcgtgatccggaacctgaacgaccaggtgctgttcatcgatcagggcaacagacccctgttcgaggacatgaccgacagcgactgcagagacaacgcccctcggaccatcttcatcatcagcatgtacaaggacagccagcctagaggcatggccgtgaccatctctgtgaagtgcgagaagatcagcaccctgagctgcgagaacaagatcatcagcttcaaagagatgaacccgccggacaacatcaaggacaccaagagcgacatcatattcttccagcggagcgtgcccggccacgacaacaagatgcagtttgagagcagcagctacgagggctacttcctggcctgcgagaaagagcgggacctgttcaagctgatcctgaagaaagaggacgaactgggcgaccgcagcatcatgttcaccgtgcagaacgaggactgataa

SEQ ID NO: 1642 - DNA, 868 bp, Artificial Sequence
  IL2NFATc1X6IL18
ggaggaaaaactgtttcatacagaaggcgtggaggaaaaactgtttcatacagaaggcgtggaggaaaaactgtttcatacagaaggcgtggaggaaaaactgtttcatacagaaggcgtggaggaaaaactgtttcatacagaaggcgtggaggaaaaactgtttcatacagaaggcgtactagttaggcgtgtacggtgggaggcctatataagcagagctcgtttagtgaaccgtcagatcgcctggagacgccatccacgctgttttgacctccatagaagacaccgggaccgatccagctcgagagacccaatgctagccaccatggccttaccagtgaccgccttgctcctgccgctggccttgctgctccacgccgccaggccgtacttcggcaagctggaaagcaagctgagcgtgatccggaacctgaacgaccaggtgctgttcatcgatcagggcaacagacccctgttcgaggacatgaccgacagcgactgcagagacaacgcccctcggaccatcttcatcatcagcatgtacaaggacagccagcctagaggcatggccgtgaccatctctgtgaagtgcgagaagatcagcaccctgagctgcgagaacaagatcatcagcttcaaagagatgaacccgccggacaacatcaaggacaccaagagcgacatcatattcttccagcggagcgtgcccggccacgacaacaagatgcagtttgagagcagcagctacgagggctacttcctggcctgcgagaaagagcgggacctgttcaagctgatcctgaagaaagaggacgaactgggcgaccgcagcatcatgttcaccgtgcagaacgaggactgataa

SEQ ID NO: 1643 - DNA, 2347 bp, Artificial Sequence
  Best antibodies with inducible IL18 +/ 1XX mutations in ITAMs of CD3zeta - MNC2 - muMNC2841BB3zFoxp3NFATIL18
atggccttaccagtgaccgccttgctcctgccgctggccttgctgctccacgccgccaggccggaggtccagctggaggagtcagggggaggcttagtgaagcctggagggtccctgaaactctcctgtgcagcctctggattcactttcagtggctatgccatgtcttgggttcgccagactccggagaagaggctggagtgggtcgcaaccattagtagtggtggtacttatatctactatccagacagtgtgaaggggcgattcaccatctccagagacaatgccaagaacaccctgtacctgcaaatgagcagtctgaggtctgaggacacggccatgtattactgtgcaagacttgggggggataattactacgaatacttcgatgtctggggcgcagggaccacggtcaccgtctcctccgccaaaacgacacccccatctgtctatggcggtggcggatccggcggtggcggatccggcggtggcggatccgacattgtgatcacacagtctacagcttccttaggtgtatctctggggcagagggccaccatctcatgcagggccagcaaaagtgtcagtacatctggctatagttatatgcactggtaccaacagagaccaggacagccacccaaactcctcatctatcttgcatccaacctagaatctggggtccctgccaggttcagtggcagtgggtctgggacagacttcaccctcaacatccatcctgtggaggaggaggatgctgcaacctattactgtcagcacagtagggagcttccgttcacgttcggaggggggaccaagctggagataaaacgggctgatgctgcaccaactgtatccacaacaacccctgcccccagacctcctaccccagcccctacaattgccagccagcctctgagcctgaggcccgaggcttgtagacctgctgctggcggagccgtgcacaccagaggactggatttcgcctgcgacatctacatctgggcgcccttggccgggacttgtggggtccttctcctgtcactggttatcaccctttactgcaaacggggcagaaagaaactcctgtatatattcaaacaaccatttatgagaccagtacaaactactcaagaggaagatggctgtagctgccgatttccagaagaagaagaaggaggatgtgaactgagagtgaagttcagcaggagcgcagacgcccccgcgtacaagcagggccagaaccagctctataacgagctcaatctaggacgaagagaggagtacgatgttttggacaagagacgtggccgggaccctgagatggggggaaagccgagaaggaagaaccctcaggaaggcctgtacaatgaactgcagaaagataagatggcggaggcctacagtgagattgggatgaaaggcgagcgccggaggggcaaggggcacgatggcctttaccagggtctcagtacagccaccaaggacacctacgacgcccttcacatgcaggccctgccccctcgctgataagtttaaactgccagaacatttctctggcctaactggccggtaccggcttcattttttccatttactgcagaggcttcattttttccatttactgcagaggcttcattttttccatttactgcagaactagttaggcgtgtacggtgggaggcctatataagcagagctcgtttagtgaaccgtcagatcgcctggagacgccatccacgctgttttgacctccatagaagacaccgggaccgatccagcctcgagagacccaatgctagccaccatggccttaccagtgaccgccttgctcctgccgctggccttgctgctccacgccgccaggccgtacttcggcaagctggaaagcaagctgagcgtgatccggaacctgaacgaccaggtgctgttcatcgatcagggcaacagacccctgttcgaggacatgaccgacagcgactgcagagacaacgcccctcggaccatcttcatcatcagcatgtacaaggacagccagcctagaggcatggccgtgaccatctctgtgaagtgcgagaagatcagcaccctgagctgcgagaacaagatcatcagcttcaaagagatgaacccgccggacaacatcaaggacaccaagagcgacatcatattcttccagcggagcgtgcccggccacgacaacaagatgcagtttgagagcagcagctacgagggctacttcctggcctgcgagaaagagcgggacctgttcaagctgatcctgaagaaagaggacgaactgggcgaccgcagcatcatgttcaccgtgcagaacgaggactgataa

SEQ ID NO: 1644 - DNA, 2299 bp, Artificial Sequence
  huMNC2841BB3zFoxp3NFATIL18
atggccttaccagtgaccgccttgctcctgccgctggccttgctgctccacgccgccaggccggaggtgcagctggtggagtctgggggaggcctggtcaagcctggggggtccctgagactctcctgtgcagcctctggattcaccttcagtggctatgccatgagctgggtccgccaggctccagggaaggggctggagtgggtctcaaccattagtagtggcggaacctacatatactaccccgactcagtgaagggccgattcaccatctccagagacaacgccaagaactcactgtatctgcaaatgaacagcctgagagccgaggacacggccgtgtattactgtgcgagacttgggggggataattactacgaatacttcgatgtctggggcaaagggaccacggtcaccgtctcctccggcggtggcggatccggcggtggcggatccggcggtggcggatccgacattgtgctgacccagtctccagcctccttggccgtgtctccaggacagagggccaccatcacctgcagagccagtaagagtgtcagtaccagcggatactcctacatgcactggtatcagcagaaaccaggacaacctcctaaactcctgatttacctggcatccaatctggagagcggggtcccagccaggttcagcggcagtgggtctgggaccgatttcaccctcacaattaatcctgtggaagctaatgatactgcaaattattactgtcagcacagtagggagctgcctttcacattcggcggagggaccaaggtggagatcaaacgaactacaacaacccctgcccccagacctcctaccccagcccctacaattgccagccagcctctgagcctgaggcccgaggcttgtagacctgctgctggcggagccgtgcacaccagaggactggatttcgcctgcgacatctacatctgggcgcccttggccgggacttgtggggtccttctcctgtcactggttatcaccctttactgcaaacggggcagaaagaaactcctgtatatattcaaacaaccatttatgagaccagtacaaactactcaagaggaagatggctgtagctgccgatttccagaagaagaagaaggaggatgtgaactgagagtgaagttcagcaggagcgcagacgcccccgcgtacaagcagggccagaaccagctctataacgagctcaatctaggacgaagagaggagtacgatgttttggacaagagacgtggccgggaccctgagatggggggaaagccgagaaggaagaaccctcaggaaggcctgtacaatgaactgcagaaagataagatggcggaggcctacagtgagattgggatgaaaggcgagcgccggaggggcaaggggcacgatggcctttaccagggtctcagtacagccaccaaggacacctacgacgcccttcacatgcaggccctgccccctcgctgataagtttaaactgccagaacatttctctggcctaactggccggtaccggcttcattttttccatttactgcagaggcttcattttttccatttactgcagaggcttcattttttccatttactgcagaactagttaggcgtgtacggtgggaggcctatataagcagagctcgtttagtgaaccgtcagatcgcctggagacgccatccacgctgttttgacctccatagaagacaccgggaccgatccagcctcgagagacccaatgctagccaccatggccttaccagtgaccgccttgctcctgccgctggccttgctgctccacgccgccaggccgtacttcggcaagctggaaagcaagctgagcgtgatccggaacctgaacgaccaggtgctgttcatcgatcagggcaacagacccctgttcgaggacatgaccgacagcgactgcagagacaacgcccctcggaccatcttcatcatcagcatgtacaaggacagccagcctagaggcatggccgtgaccatctctgtgaagtgcgagaagatcagcaccctgagctgcgagaacaagatcatcagcttcaaagagatgaacccgccggacaacatcaaggacaccaagagcgacatcatattcttccagcggagcgtgcccggccacgacaacaagatgcagtttgagagcagcagctacgagggctacttcctggcctgcgagaaagagcgggacctgttcaagctgatcctgaagaaagaggacgaactgggcgaccgcagcatcatgttcaccgtgcagaacgaggactgataa

SEQ ID NO: 1645 - DNA, 2344 bp, Artificial Sequence
  muMNC28283zFoxp3NFATIL18
atggccttaccagtgaccgccttgctcctgccgctggccttgctgctccacgccgccaggccggaggtccagctggaggagtcagggggaggcttagtgaagcctggagggtccctgaaactctcctgtgcagcctctggattcactttcagtggctatgccatgtcttgggttcgccagactccggagaagaggctggagtgggtcgcaaccattagtagtggtggtacttatatctactatccagacagtgtgaaggggcgattcaccatctccagagacaatgccaagaacaccctgtacctgcaaatgagcagtctgaggtctgaggacacggccatgtattactgtgcaagacttgggggggataattactacgaatacttcgatgtctggggcgcagggaccacggtcaccgtctcctccgccaaaacgacacccccatctgtctatggcggtggcggatccggcggtggcggatccggcggtggcggatccgacattgtgatcacacagtctacagcttccttaggtgtatctctggggcagagggccaccatctcatgcagggccagcaaaagtgtcagtacatctggctatagttatatgcactggtaccaacagagaccaggacagccacccaaactcctcatctatcttgcatccaacctagaatctggggtccctgccaggttcagtggcagtgggtctgggacagacttcaccctcaacatccatcctgtggaggaggaggatgctgcaacctattactgtcagcacagtagggagcttccgttcacgttcggaggggggaccaagctggagataaaacgggctgatgctgcaccaactgtatccacaacaacccctgcccccagacctcctaccccagcccctacaattgccagccagcctctgagcctgaggcccgaggcttgtagacctgctgctggcggagccgtgcacaccagaggactggatttcgcctgcgacatctacatctgggcgcccttggccgggacttgtggggtccttctcctgtcactggttatcaccctttactgcaggagtaagaggagcaggctcctgcacagtgactacatgaacatgactcctagaagacctgggcctaccagaaagcattaccagccctatgccccaccacgcgacttcgcagcctatcgctccagagtgaagttcagcaggagcgcagacgcccccgcgtacaagcagggccagaaccagctctataacgagctcaatctaggacgaagagaggagtacgatgttttggacaagagacgtggccgggaccctgagatggggggaaagccgagaaggaagaaccctcaggaaggcctgtacaatgaactgcagaaagataagatggcggaggcctacagtgagattgggatgaaaggcgagcgccggaggggcaaggggcacgatggcctttaccagggtctcagtacagccaccaaggacacctacgacgcccttcacatgcaggccctgccccctcgctgataagtttaaactgccagaacatttctctggcctaactggccggtaccggcttcattttttccatttactgcagaggcttcattttttccatttactgcagaggcttcattttttccatttactgcagaactagttaggcgtgtacggtgggaggcctatataagcagagctcgtttagtgaaccgtcagatcgcctggagacgccatccacgctgttttgacctccatagaagacaccgggaccgatccagcctcgagagacccaatgctagccaccatggccttaccagtgaccgccttgctcctgccgctggccttgctgctccacgccgccaggccgtacttcggcaagctggaaagcaagctgagcgtgatccggaacctgaacgaccaggtgctgttcatcgatcagggcaacagacccctgttcgaggacatgaccgacagcgactgcagagacaacgcccctcggaccatcttcatcatcagcatgtacaaggacagccagcctagaggcatggccgtgaccatctctgtgaagtgcgagaagatcagcaccctgagctgcgagaacaagatcatcagcttcaaagagatgaacccgccggacaacatcaaggacaccaagagcgacatcatattcttccagcggagcgtgcccggccacgacaacaagatgcagtttgagagcagcagctacgagggctacttcctggcctgcgagaaagagcgggacctgttcaagctgatcctgaagaaagaggacgaactgggcgaccgcagcatcatgttcaccgtgcagaacgaggactgataa

SEQ ID NO: 1646 - DNA, 2296 bp, Artificial Sequence
  huMNC28283zFoxp3NFATIL18
atggccttaccagtgaccgccttgctcctgccgctggccttgctgctccacgccgccaggccggaggtgcagctggtggagtctgggggaggcctggtcaagcctggggggtccctgagactctcctgtgcagcctctggattcaccttcagtggctatgccatgagctgggtccgccaggctccagggaaggggctggagtgggtctcaaccattagtagtggcggaacctacatatactaccccgactcagtgaagggccgattcaccatctccagagacaacgccaagaactcactgtatctgcaaatgaacagcctgagagccgaggacacggccgtgtattactgtgcgagacttgggggggataattactacgaatacttcgatgtctggggcaaagggaccacggtcaccgtctcctccggcggtggcggatccggcggtggcggatccggcggtggcggatccgacattgtgctgacccagtctccagcctccttggccgtgtctccaggacagagggccaccatcacctgcagagccagtaagagtgtcagtaccagcggatactcctacatgcactggtatcagcagaaaccaggacaacctcctaaactcctgatttacctggcatccaatctggagagcggggtcccagccaggttcagcggcagtgggtctgggaccgatttcaccctcacaattaatcctgtggaagctaatgatactgcaaattattactgtcagcacagtagggagctgcctttcacattcggcggagggaccaaggtggagatcaaacgaactacaacaacccctgcccccagacctcctaccccagcccctacaattgccagccagcctctgagcctgaggcccgaggcttgtagacctgctgctggcggagccgtgcacaccagaggactggatttcgcctgcgacatctacatctgggcgcccttggccgggacttgtggggtccttctcctgtcactggttatcaccctttactgcaggagtaagaggagcaggctcctgcacagtgactacatgaacatgactcctagaagacctgggcctaccagaaagcattaccagccctatgccccaccacgcgacttcgcagcctatcgctccagagtgaagttcagcaggagcgcagacgcccccgcgtacaagcagggccagaaccagctctataacgagctcaatctaggacgaagagaggagtacgatgttttggacaagagacgtggccgggaccctgagatggggggaaagccgagaaggaagaaccctcaggaaggcctgtacaatgaactgcagaaagataagatggcggaggcctacagtgagattgggatgaaaggcgagcgccggaggggcaaggggcacgatggcctttaccagggtctcagtacagccaccaaggacacctacgacgcccttcacatgcaggccctgccccctcgctgataagtttaaactgccagaacatttctctggcctaactggccggtaccggcttcattttttccatttactgcagaggcttcattttttccatttactgcagaggcttcattttttccatttactgcagaactagttaggcgtgtacggtgggaggcctatataagcagagctcgtttagtgaaccgtcagatcgcctggagacgccatccacgctgttttgacctccatagaagacaccgggaccgatccagcctcgagagacccaatgctagccaccatggccttaccagtgaccgccttgctcctgccgctggccttgctgctccacgccgccaggccgtacttcggcaagctggaaagcaagctgagcgtgatccggaacctgaacgaccaggtgctgttcatcgatcagggcaacagacccctgttcgaggacatgaccgacagcgactgcagagacaacgcccctcggaccatcttcatcatcagcatgtacaaggacagccagcctagaggcatggccgtgaccatctctgtgaagtgcgagaagatcagcaccctgagctgcgagaacaagatcatcagcttcaaagagatgaacccgccggacaacatcaaggacaccaagagcgacatcatattcttccagcggagcgtgcccggccacgacaacaagatgcagtttgagagcagcagctacgagggctacttcctggcctgcgagaaagagcgggacctgttcaagctgatcctgaagaaagaggacgaactgggcgaccgcagcatcatgttcaccgtgcagaacgaggactgataa

SEQ ID NO: 1647 - DNA, 2347 bp, Artificial Sequence
  muMNC2841BB3z1XXFoxp3NFATIL18
atggccttaccagtgaccgccttgctcctgccgctggccttgctgctccacgccgccaggccggaggtccagctggaggagtcagggggaggcttagtgaagcctggagggtccctgaaactctcctgtgcagcctctggattcactttcagtggctatgccatgtcttgggttcgccagactccggagaagaggctggagtgggtcgcaaccattagtagtggtggtacttatatctactatccagacagtgtgaaggggcgattcaccatctccagagacaatgccaagaacaccctgtacctgcaaatgagcagtctgaggtctgaggacacggccatgtattactgtgcaagacttgggggggataattactacgaatacttcgatgtctggggcgcagggaccacggtcaccgtctcctccgccaaaacgacacccccatctgtctatggcggtggcggatccggcggtggcggatccggcggtggcggatccgacattgtgatcacacagtctacagcttccttaggtgtatctctggggcagagggccaccatctcatgcagggccagcaaaagtgtcagtacatctggctatagttatatgcactggtaccaacagagaccaggacagccacccaaactcctcatctatcttgcatccaacctagaatctggggtccctgccaggttcagtggcagtgggtctgggacagacttcaccctcaacatccatcctgtggaggaggaggatgctgcaacctattactgtcagcacagtagggagcttccgttcacgttcggaggggggaccaagctggagataaaacgggctgatgctgcaccaactgtatccacaacaacccctgcccccagacctcctaccccagcccctacaattgccagccagcctctgagcctgaggcccgaggcttgtagacctgctgctggcggagccgtgcacaccagaggactggatttcgcctgcgacatctacatctgggcgcccttggccgggacttgtggggtccttctcctgtcactggttatcaccctttactgcaaacggggcagaaagaaactcctgtatatattcaaacaaccatttatgagaccagtacaaactactcaagaggaagatggctgtagctgccgatttccagaagaagaagaaggaggatgtgaactgagagtgaagttcagcaggagcgcagacgcccccgcgtacaagcagggccagaaccagctctataacgagctcaatctaggacgaagagaggagtacgatgttttggacaagagacgtggccgggaccctgagatggggggaaagccgagaaggaagaaccctcaggaaggcctgttcaatgaactgcagaaagataagatggcggaggccttcagtgagattgggatgaaaggcgagcgccggaggggcaaggggcacgatggccttttccagggtctcagtacagccaccaaggacaccttcgacgcccttcacatgcaggccctgccccctcgctgataagtttaaactgccagaacatttctctggcctaactggccggtaccggcttcattttttccatttactgcagaggcttcattttttccatttactgcagaggcttcattttttccatttactgcagaactagttaggcgtgtacggtgggaggcctatataagcagagctcgtttagtgaaccgtcagatcgcctggagacgccatccacgctgttttgacctccatagaagacaccgggaccgatccagcctcgagagacccaatgctagccaccatggccttaccagtgaccgccttgctcctgccgctggccttgctgctccacgccgccaggccgtacttcggcaagctggaaagcaagctgagcgtgatccggaacctgaacgaccaggtgctgttcatcgatcagggcaacagacccctgttcgaggacatgaccgacagcgactgcagagacaacgcccctcggaccatcttcatcatcagcatgtacaaggacagccagcctagaggcatggccgtgaccatctctgtgaagtgcgagaagatcagcaccctgagctgcgagaacaagatcatcagcttcaaagagatgaacccgccggacaacatcaaggacaccaagagcgacatcatattcttccagcggagcgtgcccggccacgacaacaagatgcagtttgagagcagcagctacgagggctacttcctggcctgcgagaaagagcgggacctgttcaagctgatcctgaagaaagaggacgaactgggcgaccgcagcatcatgttcaccgtgcagaacgaggactgataa

SEQ ID NO: 1648 - DNA, 2299 bp, Artificial Sequence
  huMNC2841BB3z1XXFoxp3NFATIL18
atggccttaccagtgaccgccttgctcctgccgctggccttgctgctccacgccgccaggccggaggtgcagctggtggagtctgggggaggcctggtcaagcctggggggtccctgagactctcctgtgcagcctctggattcaccttcagtggctatgccatgagctgggtccgccaggctccagggaaggggctggagtgggtctcaaccattagtagtggcggaacctacatatactaccccgactcagtgaagggccgattcaccatctccagagacaacgccaagaactcactgtatctgcaaatgaacagcctgagagccgaggacacggccgtgtattactgtgcgagacttgggggggataattactacgaatacttcgatgtctggggcaaagggaccacggtcaccgtctcctccggcggtggcggatccggcggtggcggatccggcggtggcggatccgacattgtgctgacccagtctccagcctccttggccgtgtctccaggacagagggccaccatcacctgcagagccagtaagagtgtcagtaccagcggatactcctacatgcactggtatcagcagaaaccaggacaacctcctaaactcctgatttacctggcatccaatctggagagcggggtcccagccaggttcagcggcagtgggtctgggaccgatttcaccctcacaattaatcctgtggaagctaatgatactgcaaattattactgtcagcacagtagggagctgcctttcacattcggcggagggaccaaggtggagatcaaacgaactacaacaacccctgcccccagacctcctaccccagcccctacaattgccagccagcctctgagcctgaggcccgaggcttgtagacctgctgctggcggagccgtgcacaccagaggactggatttcgcctgcgacatctacatctgggcgcccttggccgggacttgtggggtccttctcctgtcactggttatcaccctttactgcaaacggggcagaaagaaactcctgtatatattcaaacaaccatttatgagaccagtacaaactactcaagaggaagatggctgtagctgccgatttccagaagaagaagaaggaggatgtgaactgagagtgaagttcagcaggagcgcagacgcccccgcgtacaagcagggccagaaccagctctataacgagctcaatctaggacgaagagaggagtacgatgttttggacaagagacgtggccgggaccctgagatggggggaaagccgagaaggaagaaccctcaggaaggcctgttcaatgaactgcagaaagataagatggcggaggccttcagtgagattgggatgaaaggcgagcgccggaggggcaaggggcacgatggccttttccagggtctcagtacagccaccaaggacaccttcgacgcccttcacatgcaggccctgccccctcgctgataagtttaaactgccagaacatttctctggcctaactggccggtaccggcttcattttttccatttactgcagaggcttcattttttccatttactgcagaggcttcattttttccatttactgcagaactagttaggcgtgtacggtgggaggcctatataagcagagctcgtttagtgaaccgtcagatcgcctggagacgccatccacgctgttttgacctccatagaagacaccgggaccgatccagcctcgagagacccaatgctagccaccatggccttaccagtgaccgccttgctcctgccgctggccttgctgctccacgccgccaggccgtacttcggcaagctggaaagcaagctgagcgtgatccggaacctgaacgaccaggtgctgttcatcgatcagggcaacagacccctgttcgaggacatgaccgacagcgactgcagagacaacgcccctcggaccatcttcatcatcagcatgtacaaggacagccagcctagaggcatggccgtgaccatctctgtgaagtgcgagaagatcagcaccctgagctgcgagaacaagatcatcagcttcaaagagatgaacccgccggacaacatcaaggacaccaagagcgacatcatattcttccagcggagcgtgcccggccacgacaacaagatgcagtttgagagcagcagctacgagggctacttcctggcctgcgagaaagagcgggacctgttcaagctgatcctgaagaaagaggacgaactgggcgaccgcagcatcatgttcaccgtgcagaacgaggactgataa

SEQ ID NO: 1649 - DNA, 2344 bp, Artificial Sequence
  muMNC28283z1XXFoxp3NFATIL18
atggccttaccagtgaccgccttgctcctgccgctggccttgctgctccacgccgccaggccggaggtccagctggaggagtcagggggaggcttagtgaagcctggagggtccctgaaactctcctgtgcagcctctggattcactttcagtggctatgccatgtcttgggttcgccagactccggagaagaggctggagtgggtcgcaaccattagtagtggtggtacttatatctactatccagacagtgtgaaggggcgattcaccatctccagagacaatgccaagaacaccctgtacctgcaaatgagcagtctgaggtctgaggacacggccatgtattactgtgcaagacttgggggggataattactacgaatacttcgatgtctggggcgcagggaccacggtcaccgtctcctccgccaaaacgacacccccatctgtctatggcggtggcggatccggcggtggcggatccggcggtggcggatccgacattgtgatcacacagtctacagcttccttaggtgtatctctggggcagagggccaccatctcatgcagggccagcaaaagtgtcagtacatctggctatagttatatgcactggtaccaacagagaccaggacagccacccaaactcctcatctatcttgcatccaacctagaatctggggtccctgccaggttcagtggcagtgggtctgggacagacttcaccctcaacatccatcctgtggaggaggaggatgctgcaacctattactgtcagcacagtagggagcttccgttcacgttcggaggggggaccaagctggagataaaacgggctgatgctgcaccaactgtatccacaacaacccctgcccccagacctcctaccccagcccctacaattgccagccagcctctgagcctgaggcccgaggcttgtagacctgctgctggcggagccgtgcacaccagaggactggatttcgcctgcgacatctacatctgggcgcccttggccgggacttgtggggtccttctcctgtcactggttatcaccctttactgcaggagtaagaggagcaggctcctgcacagtgactacatgaacatgactcctagaagacctgggcctaccagaaagcattaccagccctatgccccaccacgcgacttcgcagcctatcgctccagagtgaagttcagcaggagcgcagacgcccccgcgtacaagcagggccagaaccagctctataacgagctcaatctaggacgaagagaggagtacgatgttttggacaagagacgtggccgggaccctgagatggggggaaagccgagaaggaagaaccctcaggaaggcctgttcaatgaactgcagaaagataagatggcggaggccttcagtgagattgggatgaaaggcgagcgccggaggggcaaggggcacgatggccttttccagggtctcagtacagccaccaaggacaccttcgacgcccttcacatgcaggccctgccccctcgctgataagtttaaactgccagaacatttctctggcctaactggccggtaccggcttcattttttccatttactgcagaggcttcattttttccatttactgcagaggcttcattttttccatttactgcagaactagttaggcgtgtacggtgggaggcctatataagcagagctcgtttagtgaaccgtcagatcgcctggagacgccatccacgctgttttgacctccatagaagacaccgggaccgatccagcctcgagagacccaatgctagccaccatggccttaccagtgaccgccttgctcctgccgctggccttgctgctccacgccgccaggccgtacttcggcaagctggaaagcaagctgagcgtgatccggaacctgaacgaccaggtgctgttcatcgatcagggcaacagacccctgttcgaggacatgaccgacagcgactgcagagacaacgcccctcggaccatcttcatcatcagcatgtacaaggacagccagcctagaggcatggccgtgaccatctctgtgaagtgcgagaagatcagcaccctgagctgcgagaacaagatcatcagcttcaaagagatgaacccgccggacaacatcaaggacaccaagagcgacatcatattcttccagcggagcgtgcccggccacgacaacaagatgcagtttgagagcagcagctacgagggctacttcctggcctgcgagaaagagcgggacctgttcaagctgatcctgaagaaagaggacgaactgggcgaccgcagcatcatgttcaccgtgcagaacgaggactgataa

SEQ ID NO: 1650 - DNA, 2296 bp, Artificial Sequence
  huMNC28283z1XXFoxp3NFATIL18
atggccttaccagtgaccgccttgctcctgccgctggccttgctgctccacgccgccaggccggaggtgcagctggtggagtctgggggaggcctggtcaagcctggggggtccctgagactctcctgtgcagcctctggattcaccttcagtggctatgccatgagctgggtccgccaggctccagggaaggggctggagtgggtctcaaccattagtagtggcggaacctacatatactaccccgactcagtgaagggccgattcaccatctccagagacaacgccaagaactcactgtatctgcaaatgaacagcctgagagccgaggacacggccgtgtattactgtgcgagacttgggggggataattactacgaatacttcgatgtctggggcaaagggaccacggtcaccgtctcctccggcggtggcggatccggcggtggcggatccggcggtggcggatccgacattgtgctgacccagtctccagcctccttggccgtgtctccaggacagagggccaccatcacctgcagagccagtaagagtgtcagtaccagcggatactcctacatgcactggtatcagcagaaaccaggacaacctcctaaactcctgatttacctggcatccaatctggagagcggggtcccagccaggttcagcggcagtgggtctgggaccgatttcaccctcacaattaatcctgtggaagctaatgatactgcaaattattactgtcagcacagtagggagctgcctttcacattcggcggagggaccaaggtggagatcaaacgaactacaacaacccctgcccccagacctcctaccccagcccctacaattgccagccagcctctgagcctgaggcccgaggcttgtagacctgctgctggcggagccgtgcacaccagaggactggatttcgcctgcgacatctacatctgggcgcccttggccgggacttgtggggtccttctcctgtcactggttatcaccctttactgcaggagtaagaggagcaggctcctgcacagtgactacatgaacatgactcctagaagacctgggcctaccagaaagcattaccagccctatgccccaccacgcgacttcgcagcctatcgctccagagtgaagttcagcaggagcgcagacgcccccgcgtacaagcagggccagaaccagctctataacgagctcaatctaggacgaagagaggagtacgatgttttggacaagagacgtggccgggaccctgagatggggggaaagccgagaaggaagaaccctcaggaaggcctgttcaatgaactgcagaaagataagatggcggaggccttcagtgagattgggatgaaaggcgagcgccggaggggcaaggggcacgatggccttttccagggtctcagtacagccaccaaggacaccttcgacgcccttcacatgcaggccctgccccctcgctgataagtttaaactgccagaacatttctctggcctaactggccggtaccggcttcattttttccatttactgcagaggcttcattttttccatttactgcagaggcttcattttttccatttactgcagaactagttaggcgtgtacggtgggaggcctatataagcagagctcgtttagtgaaccgtcagatcgcctggagacgccatccacgctgttttgacctccatagaagacaccgggaccgatccagcctcgagagacccaatgctagccaccatggccttaccagtgaccgccttgctcctgccgctggccttgctgctccacgccgccaggccgtacttcggcaagctggaaagcaagctgagcgtgatccggaacctgaacgaccaggtgctgttcatcgatcagggcaacagacccctgttcgaggacatgaccgacagcgactgcagagacaacgcccctcggaccatcttcatcatcagcatgtacaaggacagccagcctagaggcatggccgtgaccatctctgtgaagtgcgagaagatcagcaccctgagctgcgagaacaagatcatcagcttcaaagagatgaacccgccggacaacatcaaggacaccaagagcgacatcatattcttccagcggagcgtgcccggccacgacaacaagatgcagtttgagagcagcagctacgagggctacttcctggcctgcgagaaagagcgggacctgttcaagctgatcctgaagaaagaggacgaactgggcgaccgcagcatcatgttcaccgtgcagaacgaggactgataa

SEQ ID NO: 1651 - DNA, 2281 bp, Artificial Sequence
  muMNE6841BB3zFoxp3NFATIL18
atggccttaccagtgaccgccttgctcctgccgctggccttgctgctccacgccgccaggccggaggtgaaggtggtggagtctgggggagacttagtgaagcctggagggtccctgaaactctcctgtgtagtctctggattcactttcagtagatatggcatgtcttgggttcgccagactccaggcaagaggctggagtgggtcgcaaccattagtggtggcggtacttacatctactatccagacagtgtgaaggggcgattcaccatctccagagacaatgccaagaacaccctgtacctgcaaatgagcagtctgaagtctgaggacacagccatgtatcactgtacaagggataactacggtaggaactacgactacggtatggactactggggtcaaggaacctcagtcaccgtctcctcaggcggtggcggatccggcggtggcggatccggcggtggcggatcccaaattgttctcacccagtctccagcaatcatgtctgcatctccaggggaggaggtcaccctaacctgcagtgccacctcaagtgtaagttacatacactggttccagcagaggccaggcacttctcccaaactctggatttatagcacatccaacctggcttctggagtccctgttcgcttcagtggcagtggatatgggacctcttactctctcacaatcagccgaatggaggctgaagatgctgccacttattactgccagcaaaggagtagttccccattcacgttcggctcggggacaaagttggaaataaaaacaacaacccctgcccccagacctcctaccccagcccctacaattgccagccagcctctgagcctgaggcccgaggcttgtagacctgctgctggcggagccgtgcacaccagaggactggatttcgcctgcgacatctacatctgggcgcccttggccgggacttgtggggtccttctcctgtcactggttatcaccctttactgcaaacggggcagaaagaaactcctgtatatattcaaacaaccatttatgagaccagtacaaactactcaagaggaagatggctgtagctgccgatttccagaagaagaagaaggaggatgtgaactgagagtgaagttcagcaggagcgcagacgcccccgcgtacaagcagggccagaaccagctctataacgagctcaatctaggacgaagagaggagtacgatgttttggacaagagacgtggccgggaccctgagatggggggaaagccgagaaggaagaaccctcaggaaggcctgtacaatgaactgcagaaagataagatggcggaggcctacagtgagattgggatgaaaggcgagcgccggaggggcaaggggcacgatggcctttaccagggtctcagtacagccaccaaggacacctacgacgcccttcacatgcaggccctgccccctcgctgataagtttaaactgccagaacatttctctggcctaactggccggtaccggcttcattttttccatttactgcagaggcttcattttttccatttactgcagaggcttcattttttccatttactgcagaactagttaggcgtgtacggtgggaggcctatataagcagagctcgtttagtgaaccgtcagatcgcctggagacgccatccacgctgttttgacctccatagaagacaccgggaccgatccagcctcgagagacccaatgctagccaccatggccttaccagtgaccgccttgctcctgccgctggccttgctgctccacgccgccaggccgtacttcggcaagctggaaagcaagctgagcgtgatccggaacctgaacgaccaggtgctgttcatcgatcagggcaacagacccctgttcgaggacatgaccgacagcgactgcagagacaacgcccctcggaccatcttcatcatcagcatgtacaaggacagccagcctagaggcatggccgtgaccatctctgtgaagtgcgagaagatcagcaccctgagctgcgagaacaagatcatcagcttcaaagagatgaacccgccggacaacatcaaggacaccaagagcgacatcatattcttccagcggagcgtgcccggccacgacaacaagatgcagtttgagagcagcagctacgagggctacttcctggcctgcgagaaagagcgggacctgttcaagctgatcctgaagaaagaggacgaactgggcgaccgcagcatcatgttcaccgtgcagaacgaggactgataa

SEQ ID NO: 1652 - DNA, 2281 bp, Artificial Sequence
  huMNE6841BB3zFoxp3NFATIL18
atggccttaccagtgaccgccttgctcctgccgctggccttgctgctccacgccgccaggccggaggtgcagctggtggagtctgggggaggcctggtcaagcctggggggtccctgagactctcctgtgcagcctctggattcaccttcagtaggtatggcatgagctgggtccgccaggctccagggaagaggctggagtgggtctcaaccattagtggcggaggcacctacatatactacccagactcagtgaagggccgattcaccatctccagagacaacgccaagaacaccctgtatctgcaaatgaacagcctgagagccgaggacacggctgtgtattactgtaccagagataactatggccgcaactatgattatggcatggattattggggccagggcaccctggtgaccgtgagcagcggcggtggcggatccggcggtggcggatccggcggtggcggatccgaaattgtgttgacacagtctccagccaccctgtctttgtctccaggggaaagagccaccctcacctgcagcgccaccagcagtgttagctacatccactggtaccaacagaggcctggccagagccccaggctcctcatctatagcacctccaacctggccagcggcatcccagccaggttcagtggcagtgggtctgggagcgactacactctcaccatcagcagcctagagcctgaagattttgcagtttattactgtcagcagcgtagcagctcccctttcacctttggcagcggcaccaaagtggaaattaaaacaacaacccctgcccccagacctcctaccccagcccctacaattgccagccagcctctgagcctgaggcccgaggcttgtagacctgctgctggcggagccgtgcacaccagaggactggatttcgcctgcgacatctacatctgggcgcccttggccgggacttgtggggtccttctcctgtcactggttatcaccctttactgcaaacggggcagaaagaaactcctgtatatattcaaacaaccatttatgagaccagtacaaactactcaagaggaagatggctgtagctgccgatttccagaagaagaagaaggaggatgtgaactgagagtgaagttcagcaggagcgcagacgcccccgcgtacaagcagggccagaaccagctctataacgagctcaatctaggacgaagagaggagtacgatgttttggacaagagacgtggccgggaccctgagatggggggaaagccgagaaggaagaaccctcaggaaggcctgtacaatgaactgcagaaagataagatggcggaggcctacagtgagattgggatgaaaggcgagcgccggaggggcaaggggcacgatggcctttaccagggtctcagtacagccaccaaggacacctacgacgcccttcacatgcaggccctgccccctcgctgataagtttaaactgccagaacatttctctggcctaactggccggtaccggcttcattttttccatttactgcagaggcttcattttttccatttactgcagaggcttcattttttccatttactgcagaactagttaggcgtgtacggtgggaggcctatataagcagagctcgtttagtgaaccgtcagatcgcctggagacgccatccacgctgttttgacctccatagaagacaccgggaccgatccagcctcgagagacccaatgctagccaccatggccttaccagtgaccgccttgctcctgccgctggccttgctgctccacgccgccaggccgtacttcggcaagctggaaagcaagctgagcgtgatccggaacctgaacgaccaggtgctgttcatcgatcagggcaacagacccctgttcgaggacatgaccgacagcgactgcagagacaacgcccctcggaccatcttcatcatcagcatgtacaaggacagccagcctagaggcatggccgtgaccatctctgtgaagtgcgagaagatcagcaccctgagctgcgagaacaagatcatcagcttcaaagagatgaacccgccggacaacatcaaggacaccaagagcgacatcatattcttccagcggagcgtgcccggccacgacaacaagatgcagtttgagagcagcagctacgagggctacttcctggcctgcgagaaagagcgggacctgttcaagctgatcctgaagaaagaggacgaactgggcgaccgcagcatcatgttcaccgtgcagaacgaggactgataa

SEQ ID NO: 1653 - DNA, 2278 bp, Artificial Sequence
  muMNE684283zFoxp3NFATIL18
atggccttaccagtgaccgccttgctcctgccgctggccttgctgctccacgccgccaggccggaggtgaaggtggtggagtctgggggagacttagtgaagcctggagggtccctgaaactctcctgtgtagtctctggattcactttcagtagatatggcatgtcttgggttcgccagactccaggcaagaggctggagtgggtcgcaaccattagtggtggcggtacttacatctactatccagacagtgtgaaggggcgattcaccatctccagagacaatgccaagaacaccctgtacctgcaaatgagcagtctgaagtctgaggacacagccatgtatcactgtacaagggataactacggtaggaactacgactacggtatggactactggggtcaaggaacctcagtcaccgtctcctcaggcggtggcggatccggcggtggcggatccggcggtggcggatcccaaattgttctcacccagtctccagcaatcatgtctgcatctccaggggaggaggtcaccctaacctgcagtgccacctcaagtgtaagttacatacactggttccagcagaggccaggcacttctcccaaactctggatttatagcacatccaacctggcttctggagtccctgttcgcttcagtggcagtggatatgggacctcttactctctcacaatcagccgaatggaggctgaagatgctgccacttattactgccagcaaaggagtagttccccattcacgttcggctcggggacaaagttggaaataaaaacaacaacccctgcccccagacctcctaccccagcccctacaattgccagccagcctctgagcctgaggcccgaggcttgtagacctgctgctggcggagccgtgcacaccagaggactggatttcgcctgcgacatctacatctgggcgcccttggccgggacttgtggggtccttctcctgtcactggttatcaccctttactgcaggagtaagaggagcaggctcctgcacagtgactacatgaacatgactcctagaagacctgggcctaccagaaagcattaccagccctatgccccaccacgcgacttcgcagcctatcgctccagagtgaagttcagcaggagcgcagacgcccccgcgtacaagcagggccagaaccagctctataacgagctcaatctaggacgaagagaggagtacgatgttttggacaagagacgtggccgggaccctgagatggggggaaagccgagaaggaagaaccctcaggaaggcctgtacaatgaactgcagaaagataagatggcggaggcctacagtgagattgggatgaaaggcgagcgccggaggggcaaggggcacgatggcctttaccagggtctcagtacagccaccaaggacacctacgacgcccttcacatgcaggccctgccccctcgctgataagtttaaactgccagaacatttctctggcctaactggccggtaccggcttcattttttccatttactgcagaggcttcattttttccatttactgcagaggcttcattttttccatttactgcagaactagttaggcgtgtacggtgggaggcctatataagcagagctcgtttagtgaaccgtcagatcgcctggagacgccatccacgctgttttgacctccatagaagacaccgggaccgatccagcctcgagagacccaatgctagccaccatggccttaccagtgaccgccttgctcctgccgctggccttgctgctccacgccgccaggccgtacttcggcaagctggaaagcaagctgagcgtgatccggaacctgaacgaccaggtgctgttcatcgatcagggcaacagacccctgttcgaggacatgaccgacagcgactgcagagacaacgcccctcggaccatcttcatcatcagcatgtacaaggacagccagcctagaggcatggccgtgaccatctctgtgaagtgcgagaagatcagcaccctgagctgcgagaacaagatcatcagcttcaaagagatgaacccgccggacaacatcaaggacaccaagagcgacatcatattcttccagcggagcgtgcccggccacgacaacaagatgcagtttgagagcagcagctacgagggctacttcctggcctgcgagaaagagcgggacctgttcaagctgatcctgaagaaagaggacgaactgggcgaccgcagcatcatgttcaccgtgcagaacgaggactgataa

SEQ ID NO: 1654 - DNA, 2278 bp, Artificial Sequence
  huMNE68283zFoxp3NFATIL18
atggccttaccagtgaccgccttgctcctgccgctggccttgctgctccacgccgccaggccggaggtgcagctggtggagtctgggggaggcctggtcaagcctggggggtccctgagactctcctgtgcagcctctggattcaccttcagtaggtatggcatgagctgggtccgccaggctccagggaagaggctggagtgggtctcaaccattagtggcggaggcacctacatatactacccagactcagtgaagggccgattcaccatctccagagacaacgccaagaacaccctgtatctgcaaatgaacagcctgagagccgaggacacggctgtgtattactgtaccagagataactatggccgcaactatgattatggcatggattattggggccagggcaccctggtgaccgtgagcagcggcggtggcggatccggcggtggcggatccggcggtggcggatccgaaattgtgttgacacagtctccagccaccctgtctttgtctccaggggaaagagccaccctcacctgcagcgccaccagcagtgttagctacatccactggtaccaacagaggcctggccagagccccaggctcctcatctatagcacctccaacctggccagcggcatcccagccaggttcagtggcagtgggtctgggagcgactacactctcaccatcagcagcctagagcctgaagattttgcagtttattactgtcagcagcgtagcagctcccctttcacctttggcagcggcaccaaagtggaaattaaaacaacaacccctgcccccagacctcctaccccagcccctacaattgccagccagcctctgagcctgaggcccgaggcttgtagacctgctgctggcggagccgtgcacaccagaggactggatttcgcctgcgacatctacatctgggcgcccttggccgggacttgtggggtccttctcctgtcactggttatcaccctttactgcaggagtaagaggagcaggctcctgcacagtgactacatgaacatgactcctagaagacctgggcctaccagaaagcattaccagccctatgccccaccacgcgacttcgcagcctatcgctccagagtgaagttcagcaggagcgcagacgcccccgcgtacaagcagggccagaaccagctctataacgagctcaatctaggacgaagagaggagtacgatgttttggacaagagacgtggccgggaccctgagatggggggaaagccgagaaggaagaaccctcaggaaggcctgtacaatgaactgcagaaagataagatggcggaggcctacagtgagattgggatgaaaggcgagcgccggaggggcaaggggcacgatggcctttaccagggtctcagtacagccaccaaggacacctacgacgcccttcacatgcaggccctgccccctcgctgataagtttaaactgccagaacatttctctggcctaactggccggtaccggcttcattttttccatttactgcagaggcttcattttttccatttactgcagaggcttcattttttccatttactgcagaactagttaggcgtgtacggtgggaggcctatataagcagagctcgtttagtgaaccgtcagatcgcctggagacgccatccacgctgttttgacctccatagaagacaccgggaccgatccagcctcgagagacccaatgctagccaccatggccttaccagtgaccgccttgctcctgccgctggccttgctgctccacgccgccaggccgtacttcggcaagctggaaagcaagctgagcgtgatccggaacctgaacgaccaggtgctgttcatcgatcagggcaacagacccctgttcgaggacatgaccgacagcgactgcagagacaacgcccctcggaccatcttcatcatcagcatgtacaaggacagccagcctagaggcatggccgtgaccatctctgtgaagtgcgagaagatcagcaccctgagctgcgagaacaagatcatcagcttcaaagagatgaacccgccggacaacatcaaggacaccaagagcgacatcatattcttccagcggagcgtgcccggccacgacaacaagatgcagtttgagagcagcagctacgagggctacttcctggcctgcgagaaagagcgggacctgttcaagctgatcctgaagaaagaggacgaactgggcgaccgcagcatcatgttcaccgtgcagaacgaggactgataa

SEQ ID NO: 1655 - DNA, 2281 bp, Artificial Sequence
  muMNE6841BB3z1XXFoxp3NFATIL18
atggccttaccagtgaccgccttgctcctgccgctggccttgctgctccacgccgccaggccggaggtgaaggtggtggagtctgggggagacttagtgaagcctggagggtccctgaaactctcctgtgtagtctctggattcactttcagtagatatggcatgtcttgggttcgccagactccaggcaagaggctggagtgggtcgcaaccattagtggtggcggtacttacatctactatccagacagtgtgaaggggcgattcaccatctccagagacaatgccaagaacaccctgtacctgcaaatgagcagtctgaagtctgaggacacagccatgtatcactgtacaagggataactacggtaggaactacgactacggtatggactactggggtcaaggaacctcagtcaccgtctcctcaggcggtggcggatccggcggtggcggatccggcggtggcggatcccaaattgttctcacccagtctccagcaatcatgtctgcatctccaggggaggaggtcaccctaacctgcagtgccacctcaagtgtaagttacatacactggttccagcagaggccaggcacttctcccaaactctggatttatagcacatccaacctggcttctggagtccctgttcgcttcagtggcagtggatatgggacctcttactctctcacaatcagccgaatggaggctgaagatgctgccacttattactgccagcaaaggagtagttccccattcacgttcggctcggggacaaagttggaaataaaaacaacaacccctgcccccagacctcctaccccagcccctacaattgccagccagcctctgagcctgaggcccgaggcttgtagacctgctgctggcggagccgtgcacaccagaggactggatttcgcctgcgacatctacatctgggcgcccttggccgggacttgtggggtccttctcctgtcactggttatcaccctttactgcaaacggggcagaaagaaactcctgtatatattcaaacaaccatttatgagaccagtacaaactactcaagaggaagatggctgtagctgccgatttccagaagaagaagaaggaggatgtgaactgagagtgaagttcagcaggagcgcagacgcccccgcgtacaagcagggccagaaccagctctataacgagctcaatctaggacgaagagaggagtacgatgttttggacaagagacgtggccgggaccctgagatggggggaaagccgagaaggaagaaccctcaggaaggcctgttcaatgaactgcagaaagataagatggcggaggccttcagtgagattgggatgaaaggcgagcgccggaggggcaaggggcacgatggccttttccagggtctcagtacagccaccaaggacaccttcgacgcccttcacatgcaggccctgccccctcgctgataagtttaaactgccagaacatttctctggcctaactggccggtaccggcttcattttttccatttactgcagaggcttcattttttccatttactgcagaggcttcattttttccatttactgcagaactagttaggcgtgtacggtgggaggcctatataagcagagctcgtttagtgaaccgtcagatcgcctggagacgccatccacgctgttttgacctccatagaagacaccgggaccgatccagcctcgagagacccaatgctagccaccatggccttaccagtgaccgccttgctcctgccgctggccttgctgctccacgccgccaggccgtacttcggcaagctggaaagcaagctgagcgtgatccggaacctgaacgaccaggtgctgttcatcgatcagggcaacagacccctgttcgaggacatgaccgacagcgactgcagagacaacgcccctcggaccatcttcatcatcagcatgtacaaggacagccagcctagaggcatggccgtgaccatctctgtgaagtgcgagaagatcagcaccctgagctgcgagaacaagatcatcagcttcaaagagatgaacccgccggacaacatcaaggacaccaagagcgacatcatattcttccagcggagcgtgcccggccacgacaacaagatgcagtttgagagcagcagctacgagggctacttcctggcctgcgagaaagagcgggacctgttcaagctgatcctgaagaaagaggacgaactgggcgaccgcagcatcatgttcaccgtgcagaacgaggactgataa

SEQ ID NO: 1656 - DNA, 2281 bp, Artificial Sequence
  huMNE6841BB3z1XXFoxp3NFATIL18
atggccttaccagtgaccgccttgctcctgccgctggccttgctgctccacgccgccaggccggaggtgcagctggtggagtctgggggaggcctggtcaagcctggggggtccctgagactctcctgtgcagcctctggattcaccttcagtaggtatggcatgagctgggtccgccaggctccagggaagaggctggagtgggtctcaaccattagtggcggaggcacctacatatactacccagactcagtgaagggccgattcaccatctccagagacaacgccaagaacaccctgtatctgcaaatgaacagcctgagagccgaggacacggctgtgtattactgtaccagagataactatggccgcaactatgattatggcatggattattggggccagggcaccctggtgaccgtgagcagcggcggtggcggatccggcggtggcggatccggcggtggcggatccgaaattgtgttgacacagtctccagccaccctgtctttgtctccaggggaaagagccaccctcacctgcagcgccaccagcagtgttagctacatccactggtaccaacagaggcctggccagagccccaggctcctcatctatagcacctccaacctggccagcggcatcccagccaggttcagtggcagtgggtctgggagcgactacactctcaccatcagcagcctagagcctgaagattttgcagtttattactgtcagcagcgtagcagctcccctttcacctttggcagcggcaccaaagtggaaattaaaacaacaacccctgcccccagacctcctaccccagcccctacaattgccagccagcctctgagcctgaggcccgaggcttgtagacctgctgctggcggagccgtgcacaccagaggactggatttcgcctgcgacatctacatctgggcgcccttggccgggacttgtggggtccttctcctgtcactggttatcaccctttactgcaaacggggcagaaagaaactcctgtatatattcaaacaaccatttatgagaccagtacaaactactcaagaggaagatggctgtagctgccgatttccagaagaagaagaaggaggatgtgaactgagagtgaagttcagcaggagcgcagacgcccccgcgtacaagcagggccagaaccagctctataacgagctcaatctaggacgaagagaggagtacgatgttttggacaagagacgtggccgggaccctgagatggggggaaagccgagaaggaagaaccctcaggaaggcctgttcaatgaactgcagaaagataagatggcggaggccttcagtgagattgggatgaaaggcgagcgccggaggggcaaggggcacgatggccttttccagggtctcagtacagccaccaaggacaccttcgacgcccttcacatgcaggccctgccccctcgctgataagtttaaactgccagaacatttctctggcctaactggccggtaccggcttcattttttccatttactgcagaggcttcattttttccatttactgcagaggcttcattttttccatttactgcagaactagttaggcgtgtacggtgggaggcctatataagcagagctcgtttagtgaaccgtcagatcgcctggagacgccatccacgctgttttgacctccatagaagacaccgggaccgatccagcctcgagagacccaatgctagccaccatggccttaccagtgaccgccttgctcctgccgctggccttgctgctccacgccgccaggccgtacttcggcaagctggaaagcaagctgagcgtgatccggaacctgaacgaccaggtgctgttcatcgatcagggcaacagacccctgttcgaggacatgaccgacagcgactgcagagacaacgcccctcggaccatcttcatcatcagcatgtacaaggacagccagcctagaggcatggccgtgaccatctctgtgaagtgcgagaagatcagcaccctgagctgcgagaacaagatcatcagcttcaaagagatgaacccgccggacaacatcaaggacaccaagagcgacatcatattcttccagcggagcgtgcccggccacgacaacaagatgcagtttgagagcagcagctacgagggctacttcctggcctgcgagaaagagcgggacctgttcaagctgatcctgaagaaagaggacgaactgggcgaccgcagcatcatgttcaccgtgcagaacgaggactgataa

SEQ ID NO: 1657 - DNA, 2278 bp, Artificial Sequence
  muMNE68283z1XXFoxp3NFATIL18
atggccttaccagtgaccgccttgctcctgccgctggccttgctgctccacgccgccaggccggaggtgaaggtggtggagtctgggggagacttagtgaagcctggagggtccctgaaactctcctgtgtagtctctggattcactttcagtagatatggcatgtcttgggttcgccagactccaggcaagaggctggagtgggtcgcaaccattagtggtggcggtacttacatctactatccagacagtgtgaaggggcgattcaccatctccagagacaatgccaagaacaccctgtacctgcaaatgagcagtctgaagtctgaggacacagccatgtatcactgtacaagggataactacggtaggaactacgactacggtatggactactggggtcaaggaacctcagtcaccgtctcctcaggcggtggcggatccggcggtggcggatccggcggtggcggatcccaaattgttctcacccagtctccagcaatcatgtctgcatctccaggggaggaggtcaccctaacctgcagtgccacctcaagtgtaagttacatacactggttccagcagaggccaggcacttctcccaaactctggatttatagcacatccaacctggcttctggagtccctgttcgcttcagtggcagtggatatgggacctcttactctctcacaatcagccgaatggaggctgaagatgctgccacttattactgccagcaaaggagtagttccccattcacgttcggctcggggacaaagttggaaataaaaacaacaacccctgcccccagacctcctaccccagcccctacaattgccagccagcctctgagcctgaggcccgaggcttgtagacctgctgctggcggagccgtgcacaccagaggactggatttcgcctgcgacatctacatctgggcgcccttggccgggacttgtggggtccttctcctgtcactggttatcaccctttactgcaggagtaagaggagcaggctcctgcacagtgactacatgaacatgactcctagaagacctgggcctaccagaaagcattaccagccctatgccccaccacgcgacttcgcagcctatcgctccagagtgaagttcagcaggagcgcagacgcccccgcgtacaagcagggccagaaccagctctataacgagctcaatctaggacgaagagaggagtacgatgttttggacaagagacgtggccgggaccctgagatggggggaaagccgagaaggaagaaccctcaggaaggcctgttcaatgaactgcagaaagataagatggcggaggccttcagtgagattgggatgaaaggcgagcgccggaggggcaaggggcacgatggccttttccagggtctcagtacagccaccaaggacaccttcgacgcccttcacatgcaggccctgccccctcgctgataagtttaaactgccagaacatttctctggcctaactggccggtaccggcttcattttttccatttactgcagaggcttcattttttccatttactgcagaggcttcattttttccatttactgcagaactagttaggcgtgtacggtgggaggcctatataagcagagctcgtttagtgaaccgtcagatcgcctggagacgccatccacgctgttttgacctccatagaagacaccgggaccgatccagcctcgagagacccaatgctagccaccatggccttaccagtgaccgccttgctcctgccgctggccttgctgctccacgccgccaggccgtacttcggcaagctggaaagcaagctgagcgtgatccggaacctgaacgaccaggtgctgttcatcgatcagggcaacagacccctgttcgaggacatgaccgacagcgactgcagagacaacgcccctcggaccatcttcatcatcagcatgtacaaggacagccagcctagaggcatggccgtgaccatctctgtgaagtgcgagaagatcagcaccctgagctgcgagaacaagatcatcagcttcaaagagatgaacccgccggacaacatcaaggacaccaagagcgacatcatattcttccagcggagcgtgcccggccacgacaacaagatgcagtttgagagcagcagctacgagggctacttcctggcctgcgagaaagagcgggacctgttcaagctgatcctgaagaaagaggacgaactgggcgaccgcagcatcatgttcaccgtgcagaacgaggactgataa

SEQ ID NO: 1658 - DNA, 2278 bp, Artificial Sequence
  huMNE68283z1XXFoxp3NFATIL18
atggccttaccagtgaccgccttgctcctgccgctggccttgctgctccacgccgccaggccggaggtgcagctggtggagtctgggggaggcctggtcaagcctggggggtccctgagactctcctgtgcagcctctggattcaccttcagtaggtatggcatgagctgggtccgccaggctccagggaagaggctggagtgggtctcaaccattagtggcggaggcacctacatatactacccagactcagtgaagggccgattcaccatctccagagacaacgccaagaacaccctgtatctgcaaatgaacagcctgagagccgaggacacggctgtgtattactgtaccagagataactatggccgcaactatgattatggcatggattattggggccagggcaccctggtgaccgtgagcagcggcggtggcggatccggcggtggcggatccggcggtggcggatccgaaattgtgttgacacagtctccagccaccctgtctttgtctccaggggaaagagccaccctcacctgcagcgccaccagcagtgttagctacatccactggtaccaacagaggcctggccagagccccaggctcctcatctatagcacctccaacctggccagcggcatcccagccaggttcagtggcagtgggtctgggagcgactacactctcaccatcagcagcctagagcctgaagattttgcagtttattactgtcagcagcgtagcagctcccctttcacctttggcagcggcaccaaagtggaaattaaaacaacaacccctgcccccagacctcctaccccagcccctacaattgccagccagcctctgagcctgaggcccgaggcttgtagacctgctgctggcggagccgtgcacaccagaggactggatttcgcctgcgacatctacatctgggcgcccttggccgggacttgtggggtccttctcctgtcactggttatcaccctttactgcaggagtaagaggagcaggctcctgcacagtgactacatgaacatgactcctagaagacctgggcctaccagaaagcattaccagccctatgccccaccacgcgacttcgcagcctatcgctccagagtgaagttcagcaggagcgcagacgcccccgcgtacaagcagggccagaaccagctctataacgagctcaatctaggacgaagagaggagtacgatgttttggacaagagacgtggccgggaccctgagatggggggaaagccgagaaggaagaaccctcaggaaggcctgttcaatgaactgcagaaagataagatggcggaggccttcagtgagattgggatgaaaggcgagcgccggaggggcaaggggcacgatggccttttccagggtctcagtacagccaccaaggacaccttcgacgcccttcacatgcaggccctgccccctcgctgataagtttaaactgccagaacatttctctggcctaactggccggtaccggcttcattttttccatttactgcagaggcttcattttttccatttactgcagaggcttcattttttccatttactgcagaactagttaggcgtgtacggtgggaggcctatataagcagagctcgtttagtgaaccgtcagatcgcctggagacgccatccacgctgttttgacctccatagaagacaccgggaccgatccagcctcgagagacccaatgctagccaccatggccttaccagtgaccgccttgctcctgccgctggccttgctgctccacgccgccaggccgtacttcggcaagctggaaagcaagctgagcgtgatccggaacctgaacgaccaggtgctgttcatcgatcagggcaacagacccctgttcgaggacatgaccgacagcgactgcagagacaacgcccctcggaccatcttcatcatcagcatgtacaaggacagccagcctagaggcatggccgtgaccatctctgtgaagtgcgagaagatcagcaccctgagctgcgagaacaagatcatcagcttcaaagagatgaacccgccggacaacatcaaggacaccaagagcgacatcatattcttccagcggagcgtgcccggccacgacaacaagatgcagtttgagagcagcagctacgagggctacttcctggcctgcgagaaagagcgggacctgttcaagctgatcctgaagaaagaggacgaactgggcgaccgcagcatcatgttcaccgtgcagaacgaggactgataa

SEQ ID NO: 1659 - DNA, 2293 bp, Artificial Sequence
  mu20A10841BB3zFoxp3NFATIL18
atggccttaccagtgaccgccttgctcctgccgctggccttgctgctccacgccgccaggccggaagtgatgctggtggaatctggcggcggactggttaagcctggcggatctctgaagctgagctgtgccgccagcggcttcacctttagcacatacgccatgagctggatccggcagacccctgagaagagactggaatgggttgccagcatcggcagagccggcagcacctactacagcgattctgtgaagggcagattcaccatcagccgggacaacgtgcggaacatcctgtacctgcagatgagcagcctgcggagcgaggataccgccatgtactactgtgccagaggacccatctacaacgactacgacgagttcgcctattggggccagggcacactggttacagtttctgctggtggcggaggatctggcggaggtggaagcggcggaggcggatccaatatcatgatgacacagagcccgagcagcctggctgtgtctgctggcgagaaagtgaccatgtcctgcaagagcagccagagcgtgctgtactccagcaaccagaagaactacctggcctggtatcagcagaagcccggccagtctcctaagctgctgatctactgggccagcaccagagaaagcggcgtgcccgatagattcacaggcagcggcagcggaaccgacttcaccctgacaatcagctctgtgcaggccgaagatctggccgtgtactattgccaccagtacctgtccagcctgacctttggcgccggaacaaagctggaactgaagacaacaacccctgcccccagacctcctaccccagcccctacaattgccagccagcctctgagcctgaggcccgaggcttgtagacctgctgctggcggagccgtgcacaccagaggactggatttcgcctgcgacatctacatctgggcgcccttggccgggacttgtggggtccttctcctgtcactggttatcaccctttactgcaaacggggcagaaagaaactcctgtatatattcaaacaaccatttatgagaccagtacaaactactcaagaggaagatggctgtagctgccgatttccagaagaagaagaaggaggatgtgaactgagagtgaagttcagcaggagcgcagacgcccccgcgtacaagcagggccagaaccagctctataacgagctcaatctaggacgaagagaggagtacgatgttttggacaagagacgtggccgggaccctgagatggggggaaagccgagaaggaagaaccctcaggaaggcctgtacaatgaactgcagaaagataagatggcggaggcctacagtgagattgggatgaaaggcgagcgccggaggggcaaggggcacgatggcctttaccagggtctcagtacagccaccaaggacacctacgacgcccttcacatgcaggccctgccccctcgctgataagtttaaactgccagaacatttctctggcctaactggccggtaccggcttcattttttccatttactgcagaggcttcattttttccatttactgcagaggcttcattttttccatttactgcagaactagttaggcgtgtacggtgggaggcctatataagcagagctcgtttagtgaaccgtcagatcgcctggagacgccatccacgctgttttgacctccatagaagacaccgggaccgatccagcctcgagagacccaatgctagccaccatggccttaccagtgaccgccttgctcctgccgctggccttgctgctccacgccgccaggccgtacttcggcaagctggaaagcaagctgagcgtgatccggaacctgaacgaccaggtgctgttcatcgatcagggcaacagacccctgttcgaggacatgaccgacagcgactgcagagacaacgcccctcggaccatcttcatcatcagcatgtacaaggacagccagcctagaggcatggccgtgaccatctctgtgaagtgcgagaagatcagcaccctgagctgcgagaacaagatcatcagcttcaaagagatgaacccgccggacaacatcaaggacaccaagagcgacatcatattcttccagcggagcgtgcccggccacgacaacaagatgcagtttgagagcagcagctacgagggctacttcctggcctgcgagaaagagcgggacctgttcaagctgatcctgaagaaagaggacgaactgggcgaccgcagcatcatgttcaccgtgcagaacgaggactgataa

SEQ ID NO: 1660 - DNA, 2296 bp, Artificial Sequence
  hu20A10841BB3zFoxp3NFATIL18
atggccttaccagtgaccgccttgctcctgccgctggccttgctgctccacgccgccaggccggaggtgcagctggttgaatctggcggcggacttgtgaagcctggcggatctctgagactgagctgtgccgccagcggcttcacctttagcacatacgccatgagctgggtccgacaggcccctggaaaaggccttgaatgggttgcctctatcggcagagccggcagcacctactacagcgattctgtgaagggcagattcaccatcagccgggacaacgccaagaacagcctgtacctgcagatgaactccctgagagccgaggacaccgccgtgtactattgtgccagaggacccatctacaacgactacgacgagttcgcctattggggccagggcacactggtcacagtcagctctggcggtggcggaagcggaggcggtggctccggtggcggaggcagcgacattgtgctgacccagtctccagcctccttggccgtgtctccaggacagagggccaccatcacctgcaagagcagccagagcgtgctgtactccagcaaccagaagaactacctggcctggtatcagcagaaaccaggacaacctcctaaactcctgatttactgggccagcaccagagaaagcggggtcccagccaggttcagcggcagtgggtctgggaccgatttcaccctcacaattaatcctgtggaagctaatgatactgcaaattattactgtcaccagtacctgagcagcctgaccttcggcggagggaccaaggtggagatcaaacgaacaacaacccctgcccccagacctcctaccccagcccctacaattgccagccagcctctgagcctgaggcccgaggcttgtagacctgctgctggcggagccgtgcacaccagaggactggatttcgcctgcgacatctacatctgggcgcccttggccgggacttgtggggtccttctcctgtcactggttatcaccctttactgcaaacggggcagaaagaaactcctgtatatattcaaacaaccatttatgagaccagtacaaactactcaagaggaagatggctgtagctgccgatttccagaagaagaagaaggaggatgtgaactgagagtgaagttcagcaggagcgcagacgcccccgcgtacaagcagggccagaaccagctctataacgagctcaatctaggacgaagagaggagtacgatgttttggacaagagacgtggccgggaccctgagatggggggaaagccgagaaggaagaaccctcaggaaggcctgtacaatgaactgcagaaagataagatggcggaggcctacagtgagattgggatgaaaggcgagcgccggaggggcaaggggcacgatggcctttaccagggtctcagtacagccaccaaggacacctacgacgcccttcacatgcaggccctgccccctcgctgataagtttaaactgccagaacatttctctggcctaactggccggtaccggcttcattttttccatttactgcagaggcttcattttttccatttactgcagaggcttcattttttccatttactgcagaactagttaggcgtgtacggtgggaggcctatataagcagagctcgtttagtgaaccgtcagatcgcctggagacgccatccacgctgttttgacctccatagaagacaccgggaccgatccagcctcgagagacccaatgctagccaccatggccttaccagtgaccgccttgctcctgccgctggccttgctgctccacgccgccaggccgtacttcggcaagctggaaagcaagctgagcgtgatccggaacctgaacgaccaggtgctgttcatcgatcagggcaacagacccctgttcgaggacatgaccgacagcgactgcagagacaacgcccctcggaccatcttcatcatcagcatgtacaaggacagccagcctagaggcatggccgtgaccatctctgtgaagtgcgagaagatcagcaccctgagctgcgagaacaagatcatcagcttcaaagagatgaacccgccggacaacatcaaggacaccaagagcgacatcatattcttccagcggagcgtgcccggccacgacaacaagatgcagtttgagagcagcagctacgagggctacttcctggcctgcgagaaagagcgggacctgttcaagctgatcctgaagaaagaggacgaactgggcgaccgcagcatcatgttcaccgtgcagaacgaggactgataa

SEQ ID NO: 1661 - DNA, 2290 bp, Artificial Sequence
  mu20A108283zFoxp3NFATIL18
atggccttaccagtgaccgccttgctcctgccgctggccttgctgctccacgccgccaggccggaagtgatgctggtggaatctggcggcggactggttaagcctggcggatctctgaagctgagctgtgccgccagcggcttcacctttagcacatacgccatgagctggatccggcagacccctgagaagagactggaatgggttgccagcatcggcagagccggcagcacctactacagcgattctgtgaagggcagattcaccatcagccgggacaacgtgcggaacatcctgtacctgcagatgagcagcctgcggagcgaggataccgccatgtactactgtgccagaggacccatctacaacgactacgacgagttcgcctattggggccagggcacactggttacagtttctgctggtggcggaggatctggcggaggtggaagcggcggaggcggatccaatatcatgatgacacagagcccgagcagcctggctgtgtctgctggcgagaaagtgaccatgtcctgcaagagcagccagagcgtgctgtactccagcaaccagaagaactacctggcctggtatcagcagaagcccggccagtctcctaagctgctgatctactgggccagcaccagagaaagcggcgtgcccgatagattcacaggcagcggcagcggaaccgacttcaccctgacaatcagctctgtgcaggccgaagatctggccgtgtactattgccaccagtacctgtccagcctgacctttggcgccggaacaaagctggaactgaagacaacaacccctgcccccagacctcctaccccagcccctacaattgccagccagcctctgagcctgaggcccgaggcttgtagacctgctgctggcggagccgtgcacaccagaggactggatttcgcctgcgacatctacatctgggcgcccttggccgggacttgtggggtccttctcctgtcactggttatcaccctttactgcaggagtaagaggagcaggctcctgcacagtgactacatgaacatgactcctagaagacctgggcctaccagaaagcattaccagccctatgccccaccacgcgacttcgcagcctatcgctccagagtgaagttcagcaggagcgcagacgcccccgcgtacaagcagggccagaaccagctctataacgagctcaatctaggacgaagagaggagtacgatgttttggacaagagacgtggccgggaccctgagatggggggaaagccgagaaggaagaaccctcaggaaggcctgtacaatgaactgcagaaagataagatggcggaggcctacagtgagattgggatgaaaggcgagcgccggaggggcaaggggcacgatggcctttaccagggtctcagtacagccaccaaggacacctacgacgcccttcacatgcaggccctgccccctcgctgataagtttaaactgccagaacatttctctggcctaactggccggtaccggcttcattttttccatttactgcagaggcttcattttttccatttactgcagaggcttcattttttccatttactgcagaactagttaggcgtgtacggtgggaggcctatataagcagagctcgtttagtgaaccgtcagatcgcctggagacgccatccacgctgttttgacctccatagaagacaccgggaccgatccagcctcgagagacccaatgctagccaccatggccttaccagtgaccgccttgctcctgccgctggccttgctgctccacgccgccaggccgtacttcggcaagctggaaagcaagctgagcgtgatccggaacctgaacgaccaggtgctgttcatcgatcagggcaacagacccctgttcgaggacatgaccgacagcgactgcagagacaacgcccctcggaccatcttcatcatcagcatgtacaaggacagccagcctagaggcatggccgtgaccatctctgtgaagtgcgagaagatcagcaccctgagctgcgagaacaagatcatcagcttcaaagagatgaacccgccggacaacatcaaggacaccaagagcgacatcatattcttccagcggagcgtgcccggccacgacaacaagatgcagtttgagagcagcagctacgagggctacttcctggcctgcgagaaagagcgggacctgttcaagctgatcctgaagaaagaggacgaactgggcgaccgcagcatcatgttcaccgtgcagaacgaggactgataa

SEQ ID NO: 1662 - DNA, 2293 bp, Artificial Sequence
  hu20A108283zFoxp3NFATIL18
atggccttaccagtgaccgccttgctcctgccgctggccttgctgctccacgccgccaggccggaggtgcagctggttgaatctggcggcggacttgtgaagcctggcggatctctgagactgagctgtgccgccagcggcttcacctttagcacatacgccatgagctgggtccgacaggcccctggaaaaggccttgaatgggttgcctctatcggcagagccggcagcacctactacagcgattctgtgaagggcagattcaccatcagccgggacaacgccaagaacagcctgtacctgcagatgaactccctgagagccgaggacaccgccgtgtactattgtgccagaggacccatctacaacgactacgacgagttcgcctattggggccagggcacactggtcacagtcagctctggcggtggcggaagcggaggcggtggctccggtggcggaggcagcgacattgtgctgacccagtctccagcctccttggccgtgtctccaggacagagggccaccatcacctgcaagagcagccagagcgtgctgtactccagcaaccagaagaactacctggcctggtatcagcagaaaccaggacaacctcctaaactcctgatttactgggccagcaccagagaaagcggggtcccagccaggttcagcggcagtgggtctgggaccgatttcaccctcacaattaatcctgtggaagctaatgatactgcaaattattactgtcaccagtacctgagcagcctgaccttcggcggagggaccaaggtggagatcaaacgaacaacaacccctgcccccagacctcctaccccagcccctacaattgccagccagcctctgagcctgaggcccgaggcttgtagacctgctgctggcggagccgtgcacaccagaggactggatttcgcctgcgacatctacatctgggcgcccttggccgggacttgtggggtccttctcctgtcactggttatcaccctttactgcaggagtaagaggagcaggctcctgcacagtgactacatgaacatgactcctagaagacctgggcctaccagaaagcattaccagccctatgccccaccacgcgacttcgcagcctatcgctccagagtgaagttcagcaggagcgcagacgcccccgcgtacaagcagggccagaaccagctctataacgagctcaatctaggacgaagagaggagtacgatgttttggacaagagacgtggccgggaccctgagatggggggaaagccgagaaggaagaaccctcaggaaggcctgtacaatgaactgcagaaagataagatggcggaggcctacagtgagattgggatgaaaggcgagcgccggaggggcaaggggcacgatggcctttaccagggtctcagtacagccaccaaggacacctacgacgcccttcacatgcaggccctgccccctcgctgataagtttaaactgccagaacatttctctggcctaactggccggtaccggcttcattttttccatttactgcagaggcttcattttttccatttactgcagaggcttcattttttccatttactgcagaactagttaggcgtgtacggtgggaggcctatataagcagagctcgtttagtgaaccgtcagatcgcctggagacgccatccacgctgttttgacctccatagaagacaccgggaccgatccagcctcgagagacccaatgctagccaccatggccttaccagtgaccgccttgctcctgccgctggccttgctgctccacgccgccaggccgtacttcggcaagctggaaagcaagctgagcgtgatccggaacctgaacgaccaggtgctgttcatcgatcagggcaacagacccctgttcgaggacatgaccgacagcgactgcagagacaacgcccctcggaccatcttcatcatcagcatgtacaaggacagccagcctagaggcatggccgtgaccatctctgtgaagtgcgagaagatcagcaccctgagctgcgagaacaagatcatcagcttcaaagagatgaacccgccggacaacatcaaggacaccaagagcgacatcatattcttccagcggagcgtgcccggccacgacaacaagatgcagtttgagagcagcagctacgagggctacttcctggcctgcgagaaagagcgggacctgttcaagctgatcctgaagaaagaggacgaactgggcgaccgcagcatcatgttcaccgtgcagaacgaggactgataa

SEQ ID NO: 1663 - DNA, 2293 bp, Artificial Sequence
  mu20A10841BB3z1XXFoxp3NFATIL18
atggccttaccagtgaccgccttgctcctgccgctggccttgctgctccacgccgccaggccggaagtgatgctggtggaatctggcggcggactggttaagcctggcggatctctgaagctgagctgtgccgccagcggcttcacctttagcacatacgccatgagctggatccggcagacccctgagaagagactggaatgggttgccagcatcggcagagccggcagcacctactacagcgattctgtgaagggcagattcaccatcagccgggacaacgtgcggaacatcctgtacctgcagatgagcagcctgcggagcgaggataccgccatgtactactgtgccagaggacccatctacaacgactacgacgagttcgcctattggggccagggcacactggttacagtttctgctggtggcggaggatctggcggaggtggaagcggcggaggcggatccaatatcatgatgacacagagcccgagcagcctggctgtgtctgctggcgagaaagtgaccatgtcctgcaagagcagccagagcgtgctgtactccagcaaccagaagaactacctggcctggtatcagcagaagcccggccagtctcctaagctgctgatctactgggccagcaccagagaaagcggcgtgcccgatagattcacaggcagcggcagcggaaccgacttcaccctgacaatcagctctgtgcaggccgaagatctggccgtgtactattgccaccagtacctgtccagcctgacctttggcgccggaacaaagctggaactgaagacaacaacccctgcccccagacctcctaccccagcccctacaattgccagccagcctctgagcctgaggcccgaggcttgtagacctgctgctggcggagccgtgcacaccagaggactggatttcgcctgcgacatctacatctgggcgcccttggccgggacttgtggggtccttctcctgtcactggttatcaccctttactgcaaacggggcagaaagaaactcctgtatatattcaaacaaccatttatgagaccagtacaaactactcaagaggaagatggctgtagctgccgatttccagaagaagaagaaggaggatgtgaactgagagtgaagttcagcaggagcgcagacgcccccgcgtacaagcagggccagaaccagctctataacgagctcaatctaggacgaagagaggagtacgatgttttggacaagagacgtggccgggaccctgagatggggggaaagccgagaaggaagaaccctcaggaaggcctgttcaatgaactgcagaaagataagatggcggaggccttcagtgagattgggatgaaaggcgagcgccggaggggcaaggggcacgatggccttttccagggtctcagtacagccaccaaggacaccttcgacgcccttcacatgcaggccctgccccctcgctgataagtttaaactgccagaacatttctctggcctaactggccggtaccggcttcattttttccatttactgcagaggcttcattttttccatttactgcagaggcttcattttttccatttactgcagaactagttaggcgtgtacggtgggaggcctatataagcagagctcgtttagtgaaccgtcagatcgcctggagacgccatccacgctgttttgacctccatagaagacaccgggaccgatccagcctcgagagacccaatgctagccaccatggccttaccagtgaccgccttgctcctgccgctggccttgctgctccacgccgccaggccgtacttcggcaagctggaaagcaagctgagcgtgatccggaacctgaacgaccaggtgctgttcatcgatcagggcaacagacccctgttcgaggacatgaccgacagcgactgcagagacaacgcccctcggaccatcttcatcatcagcatgtacaaggacagccagcctagaggcatggccgtgaccatctctgtgaagtgcgagaagatcagcaccctgagctgcgagaacaagatcatcagcttcaaagagatgaacccgccggacaacatcaaggacaccaagagcgacatcatattcttccagcggagcgtgcccggccacgacaacaagatgcagtttgagagcagcagctacgagggctacttcctggcctgcgagaaagagcgggacctgttcaagctgatcctgaagaaagaggacgaactgggcgaccgcagcatcatgttcaccgtgcagaacgaggactgataa

SEQ ID NO: 1664 - DNA, 2296 bp, Artificial Sequence
  hu20A10841BB3z1XXFoxp3NFATIL18
atggccttaccagtgaccgccttgctcctgccgctggccttgctgctccacgccgccaggccggaggtgcagctggttgaatctggcggcggacttgtgaagcctggcggatctctgagactgagctgtgccgccagcggcttcacctttagcacatacgccatgagctgggtccgacaggcccctggaaaaggccttgaatgggttgcctctatcggcagagccggcagcacctactacagcgattctgtgaagggcagattcaccatcagccgggacaacgccaagaacagcctgtacctgcagatgaactccctgagagccgaggacaccgccgtgtactattgtgccagaggacccatctacaacgactacgacgagttcgcctattggggccagggcacactggtcacagtcagctctggcggtggcggaagcggaggcggtggctccggtggcggaggcagcgacattgtgctgacccagtctccagcctccttggccgtgtctccaggacagagggccaccatcacctgcaagagcagccagagcgtgctgtactccagcaaccagaagaactacctggcctggtatcagcagaaaccaggacaacctcctaaactcctgatttactgggccagcaccagagaaagcggggtcccagccaggttcagcggcagtgggtctgggaccgatttcaccctcacaattaatcctgtggaagctaatgatactgcaaattattactgtcaccagtacctgagcagcctgaccttcggcggagggaccaaggtggagatcaaacgaacaacaacccctgcccccagacctcctaccccagcccctacaattgccagccagcctctgagcctgaggcccgaggcttgtagacctgctgctggcggagccgtgcacaccagaggactggatttcgcctgcgacatctacatctgggcgcccttggccgggacttgtggggtccttctcctgtcactggttatcaccctttactgcaaacggggcagaaagaaactcctgtatatattcaaacaaccatttatgagaccagtacaaactactcaagaggaagatggctgtagctgccgatttccagaagaagaagaaggaggatgtgaactgagagtgaagttcagcaggagcgcagacgcccccgcgtacaagcagggccagaaccagctctataacgagctcaatctaggacgaagagaggagtacgatgttttggacaagagacgtggccgggaccctgagatggggggaaagccgagaaggaagaaccctcaggaaggcctgttcaatgaactgcagaaagataagatggcggaggccttcagtgagattgggatgaaaggcgagcgccggaggggcaaggggcacgatggccttttccagggtctcagtacagccaccaaggacaccttcgacgcccttcacatgcaggccctgccccctcgctgataagtttaaactgccagaacatttctctggcctaactggccggtaccggcttcattttttccatttactgcagaggcttcattttttccatttactgcagaggcttcattttttccatttactgcagaactagttaggcgtgtacggtgggaggcctatataagcagagctcgtttagtgaaccgtcagatcgcctggagacgccatccacgctgttttgacctccatagaagacaccgggaccgatccagcctcgagagacccaatgctagccaccatggccttaccagtgaccgccttgctcctgccgctggccttgctgctccacgccgccaggccgtacttcggcaagctggaaagcaagctgagcgtgatccggaacctgaacgaccaggtgctgttcatcgatcagggcaacagacccctgttcgaggacatgaccgacagcgactgcagagacaacgcccctcggaccatcttcatcatcagcatgtacaaggacagccagcctagaggcatggccgtgaccatctctgtgaagtgcgagaagatcagcaccctgagctgcgagaacaagatcatcagcttcaaagagatgaacccgccggacaacatcaaggacaccaagagcgacatcatattcttccagcggagcgtgcccggccacgacaacaagatgcagtttgagagcagcagctacgagggctacttcctggcctgcgagaaagagcgggacctgttcaagctgatcctgaagaaagaggacgaactgggcgaccgcagcatcatgttcaccgtgcagaacgaggactgataa

SEQ ID NO: 1665 - DNA, 2290 bp, Artificial Sequence
  mu20A108283z1XXFoxp3NFATIL18
atggccttaccagtgaccgccttgctcctgccgctggccttgctgctccacgccgccaggccggaagtgatgctggtggaatctggcggcggactggttaagcctggcggatctctgaagctgagctgtgccgccagcggcttcacctttagcacatacgccatgagctggatccggcagacccctgagaagagactggaatgggttgccagcatcggcagagccggcagcacctactacagcgattctgtgaagggcagattcaccatcagccgggacaacgtgcggaacatcctgtacctgcagatgagcagcctgcggagcgaggataccgccatgtactactgtgccagaggacccatctacaacgactacgacgagttcgcctattggggccagggcacactggttacagtttctgctggtggcggaggatctggcggaggtggaagcggcggaggcggatccaatatcatgatgacacagagcccgagcagcctggctgtgtctgctggcgagaaagtgaccatgtcctgcaagagcagccagagcgtgctgtactccagcaaccagaagaactacctggcctggtatcagcagaagcccggccagtctcctaagctgctgatctactgggccagcaccagagaaagcggcgtgcccgatagattcacaggcagcggcagcggaaccgacttcaccctgacaatcagctctgtgcaggccgaagatctggccgtgtactattgccaccagtacctgtccagcctgacctttggcgccggaacaaagctggaactgaagacaacaacccctgcccccagacctcctaccccagcccctacaattgccagccagcctctgagcctgaggcccgaggcttgtagacctgctgctggcggagccgtgcacaccagaggactggatttcgcctgcgacatctacatctgggcgcccttggccgggacttgtggggtccttctcctgtcactggttatcaccctttactgcaggagtaagaggagcaggctcctgcacagtgactacatgaacatgactcctagaagacctgggcctaccagaaagcattaccagccctatgccccaccacgcgacttcgcagcctatcgctccagagtgaagttcagcaggagcgcagacgcccccgcgtacaagcagggccagaaccagctctataacgagctcaatctaggacgaagagaggagtacgatgttttggacaagagacgtggccgggaccctgagatggggggaaagccgagaaggaagaaccctcaggaaggcctgttcaatgaactgcagaaagataagatggcggaggccttcagtgagattgggatgaaaggcgagcgccggaggggcaaggggcacgatggccttttccagggtctcagtacagccaccaaggacaccttcgacgcccttcacatgcaggccctgccccctcgctgataagtttaaactgccagaacatttctctggcctaactggccggtaccggcttcattttttccatttactgcagaggcttcattttttccatttactgcagaggcttcattttttccatttactgcagaactagttaggcgtgtacggtgggaggcctatataagcagagctcgtttagtgaaccgtcagatcgcctggagacgccatccacgctgttttgacctccatagaagacaccgggaccgatccagcctcgagagacccaatgctagccaccatggccttaccagtgaccgccttgctcctgccgctggccttgctgctccacgccgccaggccgtacttcggcaagctggaaagcaagctgagcgtgatccggaacctgaacgaccaggtgctgttcatcgatcagggcaacagacccctgttcgaggacatgaccgacagcgactgcagagacaacgcccctcggaccatcttcatcatcagcatgtacaaggacagccagcctagaggcatggccgtgaccatctctgtgaagtgcgagaagatcagcaccctgagctgcgagaacaagatcatcagcttcaaagagatgaacccgccggacaacatcaaggacaccaagagcgacatcatattcttccagcggagcgtgcccggccacgacaacaagatgcagtttgagagcagcagctacgagggctacttcctggcctgcgagaaagagcgggacctgttcaagctgatcctgaagaaagaggacgaactgggcgaccgcagcatcatgttcaccgtgcagaacgaggactgataa

SEQ ID NO: 1666 - DNA, 2293 bp, Artificial Sequence
  hu20A108283z1XXFoxp3NFATIL18
atggccttaccagtgaccgccttgctcctgccgctggccttgctgctccacgccgccaggccggaggtgcagctggttgaatctggcggcggacttgtgaagcctggcggatctctgagactgagctgtgccgccagcggcttcacctttagcacatacgccatgagctgggtccgacaggcccctggaaaaggccttgaatgggttgcctctatcggcagagccggcagcacctactacagcgattctgtgaagggcagattcaccatcagccgggacaacgccaagaacagcctgtacctgcagatgaactccctgagagccgaggacaccgccgtgtactattgtgccagaggacccatctacaacgactacgacgagttcgcctattggggccagggcacactggtcacagtcagctctggcggtggcggaagcggaggcggtggctccggtggcggaggcagcgacattgtgctgacccagtctccagcctccttggccgtgtctccaggacagagggccaccatcacctgcaagagcagccagagcgtgctgtactccagcaaccagaagaactacctggcctggtatcagcagaaaccaggacaacctcctaaactcctgatttactgggccagcaccagagaaagcggggtcccagccaggttcagcggcagtgggtctgggaccgatttcaccctcacaattaatcctgtggaagctaatgatactgcaaattattactgtcaccagtacctgagcagcctgaccttcggcggagggaccaaggtggagatcaaacgaacaacaacccctgcccccagacctcctaccccagcccctacaattgccagccagcctctgagcctgaggcccgaggcttgtagacctgctgctggcggagccgtgcacaccagaggactggatttcgcctgcgacatctacatctgggcgcccttggccgggacttgtggggtccttctcctgtcactggttatcaccctttactgcaggagtaagaggagcaggctcctgcacagtgactacatgaacatgactcctagaagacctgggcctaccagaaagcattaccagccctatgccccaccacgcgacttcgcagcctatcgctccagagtgaagttcagcaggagcgcagacgcccccgcgtacaagcagggccagaaccagctctataacgagctcaatctaggacgaagagaggagtacgatgttttggacaagagacgtggccgggaccctgagatggggggaaagccgagaaggaagaaccctcaggaaggcctgttcaatgaactgcagaaagataagatggcggaggccttcagtgagattgggatgaaaggcgagcgccggaggggcaaggggcacgatggccttttccagggtctcagtacagccaccaaggacaccttcgacgcccttcacatgcaggccctgccccctcgctgataagtttaaactgccagaacatttctctggcctaactggccggtaccggcttcattttttccatttactgcagaggcttcattttttccatttactgcagaggcttcattttttccatttactgcagaactagttaggcgtgtacggtgggaggcctatataagcagagctcgtttagtgaaccgtcagatcgcctggagacgccatccacgctgttttgacctccatagaagacaccgggaccgatccagcctcgagagacccaatgctagccaccatggccttaccagtgaccgccttgctcctgccgctggccttgctgctccacgccgccaggccgtacttcggcaagctggaaagcaagctgagcgtgatccggaacctgaacgaccaggtgctgttcatcgatcagggcaacagacccctgttcgaggacatgaccgacagcgactgcagagacaacgcccctcggaccatcttcatcatcagcatgtacaaggacagccagcctagaggcatggccgtgaccatctctgtgaagtgcgagaagatcagcaccctgagctgcgagaacaagatcatcagcttcaaagagatgaacccgccggacaacatcaaggacaccaagagcgacatcatattcttccagcggagcgtgcccggccacgacaacaagatgcagtttgagagcagcagctacgagggctacttcctggcctgcgagaaagagcgggacctgttcaagctgatcctgaagaaagaggacgaactgggcgaccgcagcatcatgttcaccgtgcagaacgaggactgataa

SEQ ID NO: 1667 - DNA, 2290 bp, Artificial Sequence
  mu25E6841BB3zFoxp3NFATIL18
atggccttaccagtgaccgccttgctcctgccgctggccttgctgctccacgccgccaggccggaggtgcagctggtggagtctgggggagacttagtgaagcctggagggtccctgaaactctcctgtgcagcctctggtttcactttcagtagttatggaatgtcttgggttcgccagactccagacaagaggctggagtgggtcgcaaccattagtaatggtggtagacacaccttctatccagacagtgtgaaggggcgattcaccatctccagagacaatgccaagaacaccctgtatctgcaaatgagcagtctgaagtctgaggacacagccatgtatttatgtgtaagacagactgggacggagggctggtttgcttactggggccaagggactctggtcactgtctctgcaggtggcggaggatctggcggaggtggaagcggcggaggcggatccgatgttgtgatgacccagactccactcactttgtcggttaccattggacaaccagcctccatctcttgcaagtcaagtcagagcctcttagatagtgatggaaagacatatttgaattggttgttacagaggccaggccagtctccaaagcgcctaatctatctggtgtctaaactggactctggagtccctgacaggttcactggcagtggatcagggacagatttcacactgaaaatcagcagagtggaggctgaggatttgggagtttattattgctggcaaggtacacattttcctcagacgttcggtggaggcaccaagctggaaatcaaaacaacaacccctgcccccagacctcctaccccagcccctacaattgccagccagcctctgagcctgaggcccgaggcttgtagacctgctgctggcggagccgtgcacaccagaggactggatttcgcctgcgacatctacatctgggcgcccttggccgggacttgtggggtccttctcctgtcactggttatcaccctttactgcaaacggggcagaaagaaactcctgtatatattcaaacaaccatttatgagaccagtacaaactactcaagaggaagatggctgtagctgccgatttccagaagaagaagaaggaggatgtgaactgagagtgaagttcagcaggagcgcagacgcccccgcgtacaagcagggccagaaccagctctataacgagctcaatctaggacgaagagaggagtacgatgttttggacaagagacgtggccgggaccctgagatggggggaaagccgagaaggaagaaccctcaggaaggcctgtacaatgaactgcagaaagataagatggcggaggcctacagtgagattgggatgaaaggcgagcgccggaggggcaaggggcacgatggcctttaccagggtctcagtacagccaccaaggacacctacgacgcccttcacatgcaggccctgccccctcgctgataagtttaaactgccagaacatttctctggcctaactggccggtaccggcttcattttttccatttactgcagaggcttcattttttccatttactgcagaggcttcattttttccatttactgcagaactagttaggcgtgtacggtgggaggcctatataagcagagctcgtttagtgaaccgtcagatcgcctggagacgccatccacgctgttttgacctccatagaagacaccgggaccgatccagcctcgagagacccaatgctagccaccatggccttaccagtgaccgccttgctcctgccgctggccttgctgctccacgccgccaggccgtacttcggcaagctggaaagcaagctgagcgtgatccggaacctgaacgaccaggtgctgttcatcgatcagggcaacagacccctgttcgaggacatgaccgacagcgactgcagagacaacgcccctcggaccatcttcatcatcagcatgtacaaggacagccagcctagaggcatggccgtgaccatctctgtgaagtgcgagaagatcagcaccctgagctgcgagaacaagatcatcagcttcaaagagatgaacccgccggacaacatcaaggacaccaagagcgacatcatattcttccagcggagcgtgcccggccacgacaacaagatgcagtttgagagcagcagctacgagggctacttcctggcctgcgagaaagagcgggacctgttcaagctgatcctgaagaaagaggacgaactgggcgaccgcagcatcatgttcaccgtgcagaacgaggactgataa

SEQ ID NO: 1668 - DNA, 2290 bp, Artificial Sequence
  hu25E6841BB3zFoxp3NFATIL18
atggccttaccagtgaccgccttgctcctgccgctggccttgctgctccacgccgccaggccggaggtgcagctggtggaatctggcggaggactggtcaagcctggaggcagcctgagactgagctgcgccgccagcggcttcacattcagcagctacggcatgagctgggtgcggcaggcccctggcaagggcctggaatgggtcagcaccatcagcaacggcggaagacacaccttctaccccgacagcgtgaagggcagattcaccatctcaagagataacgccaagaacagcctgtacctgcagatgaacagcctgcgggccgaggacaccgccgtgtactactgcgccagacagaccggcacagagggctggttcgcctactggggccagggcaccctggtgaccgtgtccagcggcggtggcggaagcggaggcggtggctccggtggcggaggcagcgacatcgtgatgacccagacccctctgtctctgagcgtgacccctggccagcctgccagcatctcttgtaaaagcagccagagcctgctggacagcgacggcaagacctacctgaactggtacctgcagaagcccggccaaagccctcagctgctgatctacctggtgtccaagctggatagcggtgttcctgatagattcagcggatctggcagcggcaccgacttcaccctgaagatcagcagagtggaagccgaggacgtgggcgtgtactactgctggcagggcacacacttcccccagacattcggccagggcaccaaggtggaaatcaagacaacaacccctgcccccagacctcctaccccagcccctacaattgccagccagcctctgagcctgaggcccgaggcttgtagacctgctgctggcggagccgtgcacaccagaggactggatttcgcctgcgacatctacatctgggcgcccttggccgggacttgtggggtccttctcctgtcactggttatcaccctttactgcaaacggggcagaaagaaactcctgtatatattcaaacaaccatttatgagaccagtacaaactactcaagaggaagatggctgtagctgccgatttccagaagaagaagaaggaggatgtgaactgagagtgaagttcagcaggagcgcagacgcccccgcgtacaagcagggccagaaccagctctataacgagctcaatctaggacgaagagaggagtacgatgttttggacaagagacgtggccgggaccctgagatggggggaaagccgagaaggaagaaccctcaggaaggcctgtacaatgaactgcagaaagataagatggcggaggcctacagtgagattgggatgaaaggcgagcgccggaggggcaaggggcacgatggcctttaccagggtctcagtacagccaccaaggacacctacgacgcccttcacatgcaggccctgccccctcgctgataagtttaaactgccagaacatttctctggcctaactggccggtaccggcttcattttttccatttactgcagaggcttcattttttccatttactgcagaggcttcattttttccatttactgcagaactagttaggcgtgtacggtgggaggcctatataagcagagctcgtttagtgaaccgtcagatcgcctggagacgccatccacgctgttttgacctccatagaagacaccgggaccgatccagcctcgagagacccaatgctagccaccatggccttaccagtgaccgccttgctcctgccgctggccttgctgctccacgccgccaggccgtacttcggcaagctggaaagcaagctgagcgtgatccggaacctgaacgaccaggtgctgttcatcgatcagggcaacagacccctgttcgaggacatgaccgacagcgactgcagagacaacgcccctcggaccatcttcatcatcagcatgtacaaggacagccagcctagaggcatggccgtgaccatctctgtgaagtgcgagaagatcagcaccctgagctgcgagaacaagatcatcagcttcaaagagatgaacccgccggacaacatcaaggacaccaagagcgacatcatattcttccagcggagcgtgcccggccacgacaacaagatgcagtttgagagcagcagctacgagggctacttcctggcctgcgagaaagagcgggacctgttcaagctgatcctgaagaaagaggacgaactgggcgaccgcagcatcatgttcaccgtgcagaacgaggactgataa

SEQ ID NO: 1669 - DNA, 2287 bp, Artificial Sequence
  mu25E68283zFoxp3NFATIL18
atggccttaccagtgaccgccttgctcctgccgctggccttgctgctccacgccgccaggccggaggtgcagctggtggagtctgggggagacttagtgaagcctggagggtccctgaaactctcctgtgcagcctctggtttcactttcagtagttatggaatgtcttgggttcgccagactccagacaagaggctggagtgggtcgcaaccattagtaatggtggtagacacaccttctatccagacagtgtgaaggggcgattcaccatctccagagacaatgccaagaacaccctgtatctgcaaatgagcagtctgaagtctgaggacacagccatgtatttatgtgtaagacagactgggacggagggctggtttgcttactggggccaagggactctggtcactgtctctgcaggtggcggaggatctggcggaggtggaagcggcggaggcggatccgatgttgtgatgacccagactccactcactttgtcggttaccattggacaaccagcctccatctcttgcaagtcaagtcagagcctcttagatagtgatggaaagacatatttgaattggttgttacagaggccaggccagtctccaaagcgcctaatctatctggtgtctaaactggactctggagtccctgacaggttcactggcagtggatcagggacagatttcacactgaaaatcagcagagtggaggctgaggatttgggagtttattattgctggcaaggtacacattttcctcagacgttcggtggaggcaccaagctggaaatcaaaacaacaacccctgcccccagacctcctaccccagcccctacaattgccagccagcctctgagcctgaggcccgaggcttgtagacctgctgctggcggagccgtgcacaccagaggactggatttcgcctgcgacatctacatctgggcgcccttggccgggacttgtggggtccttctcctgtcactggttatcaccctttactgcaggagtaagaggagcaggctcctgcacagtgactacatgaacatgactcctagaagacctgggcctaccagaaagcattaccagccctatgccccaccacgcgacttcgcagcctatcgctccagagtgaagttcagcaggagcgcagacgcccccgcgtacaagcagggccagaaccagctctataacgagctcaatctaggacgaagagaggagtacgatgttttggacaagagacgtggccgggaccctgagatggggggaaagccgagaaggaagaaccctcaggaaggcctgtacaatgaactgcagaaagataagatggcggaggcctacagtgagattgggatgaaaggcgagcgccggaggggcaaggggcacgatggcctttaccagggtctcagtacagccaccaaggacacctacgacgcccttcacatgcaggccctgccccctcgctgataagtttaaactgccagaacatttctctggcctaactggccggtaccggcttcattttttccatttactgcagaggcttcattttttccatttactgcagaggcttcattttttccatttactgcagaactagttaggcgtgtacggtgggaggcctatataagcagagctcgtttagtgaaccgtcagatcgcctggagacgccatccacgctgttttgacctccatagaagacaccgggaccgatccagcctcgagagacccaatgctagccaccatggccttaccagtgaccgccttgctcctgccgctggccttgctgctccacgccgccaggccgtacttcggcaagctggaaagcaagctgagcgtgatccggaacctgaacgaccaggtgctgttcatcgatcagggcaacagacccctgttcgaggacatgaccgacagcgactgcagagacaacgcccctcggaccatcttcatcatcagcatgtacaaggacagccagcctagaggcatggccgtgaccatctctgtgaagtgcgagaagatcagcaccctgagctgcgagaacaagatcatcagcttcaaagagatgaacccgccggacaacatcaaggacaccaagagcgacatcatattcttccagcggagcgtgcccggccacgacaacaagatgcagtttgagagcagcagctacgagggctacttcctggcctgcgagaaagagcgggacctgttcaagctgatcctgaagaaagaggacgaactgggcgaccgcagcatcatgttcaccgtgcagaacgaggactgataa

SEQ ID NO: 1670 - DNA, 2287 bp, Artificial Sequence
  hu25E68283zFoxp3NFATIL18
atggccttaccagtgaccgccttgctcctgccgctggccttgctgctccacgccgccaggccggaggtgcagctggtggaatctggcggaggactggtcaagcctggaggcagcctgagactgagctgcgccgccagcggcttcacattcagcagctacggcatgagctgggtgcggcaggcccctggcaagggcctggaatgggtcagcaccatcagcaacggcggaagacacaccttctaccccgacagcgtgaagggcagattcaccatctcaagagataacgccaagaacagcctgtacctgcagatgaacagcctgcgggccgaggacaccgccgtgtactactgcgccagacagaccggcacagagggctggttcgcctactggggccagggcaccctggtgaccgtgtccagcggcggtggcggaagcggaggcggtggctccggtggcggaggcagcgacatcgtgatgacccagacccctctgtctctgagcgtgacccctggccagcctgccagcatctcttgtaaaagcagccagagcctgctggacagcgacggcaagacctacctgaactggtacctgcagaagcccggccaaagccctcagctgctgatctacctggtgtccaagctggatagcggtgttcctgatagattcagcggatctggcagcggcaccgacttcaccctgaagatcagcagagtggaagccgaggacgtgggcgtgtactactgctggcagggcacacacttcccccagacattcggccagggcaccaaggtggaaatcaagacaacaacccctgcccccagacctcctaccccagcccctacaattgccagccagcctctgagcctgaggcccgaggcttgtagacctgctgctggcggagccgtgcacaccagaggactggatttcgcctgcgacatctacatctgggcgcccttggccgggacttgtggggtccttctcctgtcactggttatcaccctttactgcaggagtaagaggagcaggctcctgcacagtgactacatgaacatgactcctagaagacctgggcctaccagaaagcattaccagccctatgccccaccacgcgacttcgcagcctatcgctccagagtgaagttcagcaggagcgcagacgcccccgcgtacaagcagggccagaaccagctctataacgagctcaatctaggacgaagagaggagtacgatgttttggacaagagacgtggccgggaccctgagatggggggaaagccgagaaggaagaaccctcaggaaggcctgtacaatgaactgcagaaagataagatggcggaggcctacagtgagattgggatgaaaggcgagcgccggaggggcaaggggcacgatggcctttaccagggtctcagtacagccaccaaggacacctacgacgcccttcacatgcaggccctgccccctcgctgataagtttaaactgccagaacatttctctggcctaactggccggtaccggcttcattttttccatttactgcagaggcttcattttttccatttactgcagaggcttcattttttccatttactgcagaactagttaggcgtgtacggtgggaggcctatataagcagagctcgtttagtgaaccgtcagatcgcctggagacgccatccacgctgttttgacctccatagaagacaccgggaccgatccagcctcgagagacccaatgctagccaccatggccttaccagtgaccgccttgctcctgccgctggccttgctgctccacgccgccaggccgtacttcggcaagctggaaagcaagctgagcgtgatccggaacctgaacgaccaggtgctgttcatcgatcagggcaacagacccctgttcgaggacatgaccgacagcgactgcagagacaacgcccctcggaccatcttcatcatcagcatgtacaaggacagccagcctagaggcatggccgtgaccatctctgtgaagtgcgagaagatcagcaccctgagctgcgagaacaagatcatcagcttcaaagagatgaacccgccggacaacatcaaggacaccaagagcgacatcatattcttccagcggagcgtgcccggccacgacaacaagatgcagtttgagagcagcagctacgagggctacttcctggcctgcgagaaagagcgggacctgttcaagctgatcctgaagaaagaggacgaactgggcgaccgcagcatcatgttcaccgtgcagaacgaggactgataa

SEQ ID NO: 1671 - DNA, 2290 bp, Artificial Sequence
  mu25E6841BB3z1XXFoxp3NFATIL18
atggccttaccagtgaccgccttgctcctgccgctggccttgctgctccacgccgccaggccggaggtgcagctggtggagtctgggggagacttagtgaagcctggagggtccctgaaactctcctgtgcagcctctggtttcactttcagtagttatggaatgtcttgggttcgccagactccagacaagaggctggagtgggtcgcaaccattagtaatggtggtagacacaccttctatccagacagtgtgaaggggcgattcaccatctccagagacaatgccaagaacaccctgtatctgcaaatgagcagtctgaagtctgaggacacagccatgtatttatgtgtaagacagactgggacggagggctggtttgcttactggggccaagggactctggtcactgtctctgcaggtggcggaggatctggcggaggtggaagcggcggaggcggatccgatgttgtgatgacccagactccactcactttgtcggttaccattggacaaccagcctccatctcttgcaagtcaagtcagagcctcttagatagtgatggaaagacatatttgaattggttgttacagaggccaggccagtctccaaagcgcctaatctatctggtgtctaaactggactctggagtccctgacaggttcactggcagtggatcagggacagatttcacactgaaaatcagcagagtggaggctgaggatttgggagtttattattgctggcaaggtacacattttcctcagacgttcggtggaggcaccaagctggaaatcaaaacaacaacccctgcccccagacctcctaccccagcccctacaattgccagccagcctctgagcctgaggcccgaggcttgtagacctgctgctggcggagccgtgcacaccagaggactggatttcgcctgcgacatctacatctgggcgcccttggccgggacttgtggggtccttctcctgtcactggttatcaccctttactgcaaacggggcagaaagaaactcctgtatatattcaaacaaccatttatgagaccagtacaaactactcaagaggaagatggctgtagctgccgatttccagaagaagaagaaggaggatgtgaactgagagtgaagttcagcaggagcgcagacgcccccgcgtacaagcagggccagaaccagctctataacgagctcaatctaggacgaagagaggagtacgatgttttggacaagagacgtggccgggaccctgagatggggggaaagccgagaaggaagaaccctcaggaaggcctgttcaatgaactgcagaaagataagatggcggaggccttcagtgagattgggatgaaaggcgagcgccggaggggcaaggggcacgatggccttttccagggtctcagtacagccaccaaggacaccttcgacgcccttcacatgcaggccctgccccctcgctgataagtttaaactgccagaacatttctctggcctaactggccggtaccggcttcattttttccatttactgcagaggcttcattttttccatttactgcagaggcttcattttttccatttactgcagaactagttaggcgtgtacggtgggaggcctatataagcagagctcgtttagtgaaccgtcagatcgcctggagacgccatccacgctgttttgacctccatagaagacaccgggaccgatccagcctcgagagacccaatgctagccaccatggccttaccagtgaccgccttgctcctgccgctggccttgctgctccacgccgccaggccgtacttcggcaagctggaaagcaagctgagcgtgatccggaacctgaacgaccaggtgctgttcatcgatcagggcaacagacccctgttcgaggacatgaccgacagcgactgcagagacaacgcccctcggaccatcttcatcatcagcatgtacaaggacagccagcctagaggcatggccgtgaccatctctgtgaagtgcgagaagatcagcaccctgagctgcgagaacaagatcatcagcttcaaagagatgaacccgccggacaacatcaaggacaccaagagcgacatcatattcttccagcggagcgtgcccggccacgacaacaagatgcagtttgagagcagcagctacgagggctacttcctggcctgcgagaaagagcgggacctgttcaagctgatcctgaagaaagaggacgaactgggcgaccgcagcatcatgttcaccgtgcagaacgaggactgataa

SEQ ID NO: 1672 - DNA, 2290 bp, Artificial Sequence
  hu25E6841BB3z1XXFoxp3NFATIL18
atggccttaccagtgaccgccttgctcctgccgctggccttgctgctccacgccgccaggccggaggtgcagctggtggaatctggcggaggactggtcaagcctggaggcagcctgagactgagctgcgccgccagcggcttcacattcagcagctacggcatgagctgggtgcggcaggcccctggcaagggcctggaatgggtcagcaccatcagcaacggcggaagacacaccttctaccccgacagcgtgaagggcagattcaccatctcaagagataacgccaagaacagcctgtacctgcagatgaacagcctgcgggccgaggacaccgccgtgtactactgcgccagacagaccggcacagagggctggttcgcctactggggccagggcaccctggtgaccgtgtccagcggcggtggcggaagcggaggcggtggctccggtggcggaggcagcgacatcgtgatgacccagacccctctgtctctgagcgtgacccctggccagcctgccagcatctcttgtaaaagcagccagagcctgctggacagcgacggcaagacctacctgaactggtacctgcagaagcccggccaaagccctcagctgctgatctacctggtgtccaagctggatagcggtgttcctgatagattcagcggatctggcagcggcaccgacttcaccctgaagatcagcagagtggaagccgaggacgtgggcgtgtactactgctggcagggcacacacttcccccagacattcggccagggcaccaaggtggaaatcaagacaacaacccctgcccccagacctcctaccccagcccctacaattgccagccagcctctgagcctgaggcccgaggcttgtagacctgctgctggcggagccgtgcacaccagaggactggatttcgcctgcgacatctacatctgggcgcccttggccgggacttgtggggtccttctcctgtcactggttatcaccctttactgcaaacggggcagaaagaaactcctgtatatattcaaacaaccatttatgagaccagtacaaactactcaagaggaagatggctgtagctgccgatttccagaagaagaagaaggaggatgtgaactgagagtgaagttcagcaggagcgcagacgcccccgcgtacaagcagggccagaaccagctctataacgagctcaatctaggacgaagagaggagtacgatgttttggacaagagacgtggccgggaccctgagatggggggaaagccgagaaggaagaaccctcaggaaggcctgttcaatgaactgcagaaagataagatggcggaggccttcagtgagattgggatgaaaggcgagcgccggaggggcaaggggcacgatggccttttccagggtctcagtacagccaccaaggacaccttcgacgcccttcacatgcaggccctgccccctcgctgataagtttaaactgccagaacatttctctggcctaactggccggtaccggcttcattttttccatttactgcagaggcttcattttttccatttactgcagaggcttcattttttccatttactgcagaactagttaggcgtgtacggtgggaggcctatataagcagagctcgtttagtgaaccgtcagatcgcctggagacgccatccacgctgttttgacctccatagaagacaccgggaccgatccagcctcgagagacccaatgctagccaccatggccttaccagtgaccgccttgctcctgccgctggccttgctgctccacgccgccaggccgtacttcggcaagctggaaagcaagctgagcgtgatccggaacctgaacgaccaggtgctgttcatcgatcagggcaacagacccctgttcgaggacatgaccgacagcgactgcagagacaacgcccctcggaccatcttcatcatcagcatgtacaaggacagccagcctagaggcatggccgtgaccatctctgtgaagtgcgagaagatcagcaccctgagctgcgagaacaagatcatcagcttcaaagagatgaacccgccggacaacatcaaggacaccaagagcgacatcatattcttccagcggagcgtgcccggccacgacaacaagatgcagtttgagagcagcagctacgagggctacttcctggcctgcgagaaagagcgggacctgttcaagctgatcctgaagaaagaggacgaactgggcgaccgcagcatcatgttcaccgtgcagaacgaggactgataa

SEQ ID NO: 1673 - DNA, 2287 bp, Artificial Sequence
  mu25E68283z1XXFoxp3NFATIL18
atggccttaccagtgaccgccttgctcctgccgctggccttgctgctccacgccgccaggccggaggtgcagctggtggagtctgggggagacttagtgaagcctggagggtccctgaaactctcctgtgcagcctctggtttcactttcagtagttatggaatgtcttgggttcgccagactccagacaagaggctggagtgggtcgcaaccattagtaatggtggtagacacaccttctatccagacagtgtgaaggggcgattcaccatctccagagacaatgccaagaacaccctgtatctgcaaatgagcagtctgaagtctgaggacacagccatgtatttatgtgtaagacagactgggacggagggctggtttgcttactggggccaagggactctggtcactgtctctgcaggtggcggaggatctggcggaggtggaagcggcggaggcggatccgatgttgtgatgacccagactccactcactttgtcggttaccattggacaaccagcctccatctcttgcaagtcaagtcagagcctcttagatagtgatggaaagacatatttgaattggttgttacagaggccaggccagtctccaaagcgcctaatctatctggtgtctaaactggactctggagtccctgacaggttcactggcagtggatcagggacagatttcacactgaaaatcagcagagtggaggctgaggatttgggagtttattattgctggcaaggtacacattttcctcagacgttcggtggaggcaccaagctggaaatcaaaacaacaacccctgcccccagacctcctaccccagcccctacaattgccagccagcctctgagcctgaggcccgaggcttgtagacctgctgctggcggagccgtgcacaccagaggactggatttcgcctgcgacatctacatctgggcgcccttggccgggacttgtggggtccttctcctgtcactggttatcaccctttactgcaggagtaagaggagcaggctcctgcacagtgactacatgaacatgactcctagaagacctgggcctaccagaaagcattaccagccctatgccccaccacgcgacttcgcagcctatcgctccagagtgaagttcagcaggagcgcagacgcccccgcgtacaagcagggccagaaccagctctataacgagctcaatctaggacgaagagaggagtacgatgttttggacaagagacgtggccgggaccctgagatggggggaaagccgagaaggaagaaccctcaggaaggcctgttcaatgaactgcagaaagataagatggcggaggccttcagtgagattgggatgaaaggcgagcgccggaggggcaaggggcacgatggccttttccagggtctcagtacagccaccaaggacaccttcgacgcccttcacatgcaggccctgccccctcgctgataagtttaaactgccagaacatttctctggcctaactggccggtaccggcttcattttttccatttactgcagaggcttcattttttccatttactgcagaggcttcattttttccatttactgcagaactagttaggcgtgtacggtgggaggcctatataagcagagctcgtttagtgaaccgtcagatcgcctggagacgccatccacgctgttttgacctccatagaagacaccgggaccgatccagcctcgagagacccaatgctagccaccatggccttaccagtgaccgccttgctcctgccgctggccttgctgctccacgccgccaggccgtacttcggcaagctggaaagcaagctgagcgtgatccggaacctgaacgaccaggtgctgttcatcgatcagggcaacagacccctgttcgaggacatgaccgacagcgactgcagagacaacgcccctcggaccatcttcatcatcagcatgtacaaggacagccagcctagaggcatggccgtgaccatctctgtgaagtgcgagaagatcagcaccctgagctgcgagaacaagatcatcagcttcaaagagatgaacccgccggacaacatcaaggacaccaagagcgacatcatattcttccagcggagcgtgcccggccacgacaacaagatgcagtttgagagcagcagctacgagggctacttcctggcctgcgagaaagagcgggacctgttcaagctgatcctgaagaaagaggacgaactgggcgaccgcagcatcatgttcaccgtgcagaacgaggactgataa

SEQ ID NO: 1674 - DNA, 2287 bp, Artificial Sequence
  hu25E68283z1XXFoxp3NFATIL18
atggccttaccagtgaccgccttgctcctgccgctggccttgctgctccacgccgccaggccggaggtgcagctggtggaatctggcggaggactggtcaagcctggaggcagcctgagactgagctgcgccgccagcggcttcacattcagcagctacggcatgagctgggtgcggcaggcccctggcaagggcctggaatgggtcagcaccatcagcaacggcggaagacacaccttctaccccgacagcgtgaagggcagattcaccatctcaagagataacgccaagaacagcctgtacctgcagatgaacagcctgcgggccgaggacaccgccgtgtactactgcgccagacagaccggcacagagggctggttcgcctactggggccagggcaccctggtgaccgtgtccagcggcggtggcggaagcggaggcggtggctccggtggcggaggcagcgacatcgtgatgacccagacccctctgtctctgagcgtgacccctggccagcctgccagcatctcttgtaaaagcagccagagcctgctggacagcgacggcaagacctacctgaactggtacctgcagaagcccggccaaagccctcagctgctgatctacctggtgtccaagctggatagcggtgttcctgatagattcagcggatctggcagcggcaccgacttcaccctgaagatcagcagagtggaagccgaggacgtgggcgtgtactactgctggcagggcacacacttcccccagacattcggccagggcaccaaggtggaaatcaagacaacaacccctgcccccagacctcctaccccagcccctacaattgccagccagcctctgagcctgaggcccgaggcttgtagacctgctgctggcggagccgtgcacaccagaggactggatttcgcctgcgacatctacatctgggcgcccttggccgggacttgtggggtccttctcctgtcactggttatcaccctttactgcaggagtaagaggagcaggctcctgcacagtgactacatgaacatgactcctagaagacctgggcctaccagaaagcattaccagccctatgccccaccacgcgacttcgcagcctatcgctccagagtgaagttcagcaggagcgcagacgcccccgcgtacaagcagggccagaaccagctctataacgagctcaatctaggacgaagagaggagtacgatgttttggacaagagacgtggccgggaccctgagatggggggaaagccgagaaggaagaaccctcaggaaggcctgttcaatgaactgcagaaagataagatggcggaggccttcagtgagattgggatgaaaggcgagcgccggaggggcaaggggcacgatggccttttccagggtctcagtacagccaccaaggacaccttcgacgcccttcacatgcaggccctgccccctcgctgataagtttaaactgccagaacatttctctggcctaactggccggtaccggcttcattttttccatttactgcagaggcttcattttttccatttactgcagaggcttcattttttccatttactgcagaactagttaggcgtgtacggtgggaggcctatataagcagagctcgtttagtgaaccgtcagatcgcctggagacgccatccacgctgttttgacctccatagaagacaccgggaccgatccagcctcgagagacccaatgctagccaccatggccttaccagtgaccgccttgctcctgccgctggccttgctgctccacgccgccaggccgtacttcggcaagctggaaagcaagctgagcgtgatccggaacctgaacgaccaggtgctgttcatcgatcagggcaacagacccctgttcgaggacatgaccgacagcgactgcagagacaacgcccctcggaccatcttcatcatcagcatgtacaaggacagccagcctagaggcatggccgtgaccatctctgtgaagtgcgagaagatcagcaccctgagctgcgagaacaagatcatcagcttcaaagagatgaacccgccggacaacatcaaggacaccaagagcgacatcatattcttccagcggagcgtgcccggccacgacaacaagatgcagtttgagagcagcagctacgagggctacttcctggcctgcgagaaagagcgggacctgttcaagctgatcctgaagaaagaggacgaactgggcgaccgcagcatcatgttcaccgtgcagaacgaggactgataa

SEQ ID NO: 1675 - DNA, 1482 bp, Artificial Sequence
  pCDH MSCV h20A10-O CAR 41BB
atggccttaccagtgaccgccttgctcctgccgctggccttgctgctccacgccgccaggccggaggtgcagctggttgaatctggcggcggacttgtgaagcctggcggatctctgagactgagctgtgccgccagcggcttcacctttagcacatacgccatgagctgggtccgacaggcccctggaaaaggccttgaatgggttgcctctatcggcagagccggcagcacctactacagcgattctgtgaagggcagattcaccatcagccgggacaacgccaagaacagcctgtacctgcagatgaactccctgagagccgaggacaccgccgtgtactattgtgccagaggacccatctacaacgactacgacgagttcgcctattggggccagggcacactggtcacagtcagctctggcggtggcggaagcggaggcggtggctccggtggcggaggcagcgacatcgtgatgacacagagccctgatagcctggccgtgtctctgggagagagagccaccatcaactgcaagagcagccagagcgtgctgtactccagcaaccagaagaactacctggcctggtatcagcagaagcccggccagcctcctaagctgctgatctactgggccagcaccagagaaagcggcgtgcccgatagattttctggcagcggctctggcaccgacttcaccctgacaattagctccctgcaggccgaggatgtggccgtgtactactgtcaccagtacctgagcagcctgacctttggcggcggaacaaaggtggaaatcaagcgaacaacaacccctgcccccagacctcctaccccagcccctacaattgccagccagcctctgagcctgaggcccgaggcttgtagacctgctgctggcggagccgtgcacaccagaggactggatttcgcctgcgacatctacatctgggcgcccttggccgggacttgtggggtccttctcctgtcactggttatcaccctttactgcaaacggggcagaaagaaactcctgtatatattcaaacaaccatttatgagaccagtacaaactactcaagaggaagatggctgtagctgccgatttccagaagaagaagaaggaggatgtgaactgagagtgaagttcagcaggagcgcagacgcccccgcgtacaagcagggccagaaccagctctataacgagctcaatctaggacgaagagaggagtacgatgttttggacaagagacgtggccgggaccctgagatggggggaaagccgagaaggaagaaccctcaggaaggcctgtacaatgaactgcagaaagataagatggcggaggcctacagtgagattgggatgaaaggcgagcgccggaggggcaaggggcacgatggcctttaccagggtctcagtacagccaccaaggacacctacgacgcccttcacatgcaggccctgccccctcgctgataa

SEQ ID NO: 1676 - DNA, 63 bp, Artificial Sequence
  CD8 leader sequence
atggccttaccagtgaccgccttgctcctgccgctggccttgctgctccacgccgccaggccg

SEQ ID NO: 1677 - DNA, 744 bp, Artificial Sequence
  h20A10O scFV
gaggtgcagctggttgaatctggcggcggacttgtgaagcctggcggatctctgagactgagctgtgccgccagcggcttcacctttagcacatacgccatgagctgggtccgacaggcccctggaaaaggccttgaatgggttgcctctatcggcagagccggcagcacctactacagcgattctgtgaagggcagattcaccatcagccgggacaacgccaagaacagcctgtacctgcagatgaactccctgagagccgaggacaccgccgtgtactattgtgccagaggacccatctacaacgactacgacgagttcgcctattggggccagggcacactggtcacagtcagctctggcggtggcggaagcggaggcggtggctccggtggcggaggcagcgacatcgtgatgacacagagccctgatagcctggccgtgtctctgggagagagagccaccatcaactgcaagagcagccagagcgtgctgtactccagcaaccagaagaactacctggcctggtatcagcagaagcccggccagcctcctaagctgctgatctactgggccagcaccagagaaagcggcgtgcccgatagattttctggcagcggctctggcaccgacttcaccctgacaattagctccctgcaggccgaggatgtggccgtgtactactgtcaccagtacctgagcagcctgacctttggcggcggaacaaaggtggaaatcaagcga

SEQ ID NO: 1678 - DNA, 135 bp, Artificial Sequence
  CD8 hinge region
acaacaacccctgcccccagacctcctaccccagcccctacaattgccagccagcctctgagcctgaggcccgaggcttgtagacctgctgctggcggagccgtgcacaccagaggactggatttcgcctgcgac

SEQ ID NO: 1679 - DNA, 63 bp, Artificial Sequence; identical to SEQ ID NO: 1676
  CD8 leader sequence

SEQ ID NO: 1680 - DNA, 744 bp, Artificial Sequence; identical to SEQ ID NO: 1580
  h20A10N scFV

SEQ ID NO: 1681 - DNA, 135 bp, Artificial Sequence; identical to SEQ ID NO: 1678
  CD8 hinge region

SEQ ID NO: 1682 - DNA, 72 bp, Artificial Sequence; identical to SEQ ID NO: 656
  CD8 transmembrane domain

SEQ ID NO: 1683 - DNA, 126 bp, Artificial Sequence; identical to SEQ ID NO: 658
  41BB

SEQ ID NO: 1684 - DNA, 342 bp, Artificial Sequence
  CD3
agagtgaagttcagcaggagcgcagacgcccccgcgtacaagcagggccagaaccagctctataacgagctcaatctaggacgaagagaggagtacgatgttttggacaagagacgtggccgggaccctgagatggggggaaagccgagaaggaagaaccctcaggaaggcctgtacaatgaactgcagaaagataagatggcggaggcctacagtgagattgggatgaaaggcgagcgccggaggggcaaggggcacgatggcctttaccagggtctcagtacagccaccaaggacacctacgacgcccttcacatgcaggccctgccccctcgctgataa

SEQ ID NO: 1685 - DNA, 1482 bp, Artificial Sequence; identical to SEQ ID NO: 1584
  pCDH MSCV h20A10-C2 CAR 41BB

SEQ ID NO: 1686 - DNA, 63 bp, Artificial Sequence; identical to SEQ ID NO: 1676
  CD8 leader sequence

SEQ ID NO: 1687 - DNA, 744 bp, Artificial Sequence; identical to SEQ ID NO: 1578
  h20A10C2 scFV

SEQ ID NO: 1688 - DNA, 135 bp, Artificial Sequence; identical to SEQ ID NO: 1678
  CD8 hinge region

SEQ ID NO: 1689 - DNA, 72 bp, Artificial Sequence; identical to SEQ ID NO: 656
  CD8 transmembrane region

SEQ ID NO: 1690 - DNA, 126 bp, Artificial Sequence; identical to SEQ ID NO: 658
  41BB

SEQ ID NO: 1691 - DNA, 342 bp, Artificial Sequence; identical to SEQ ID NO: 1684
  CD3

SEQ ID NO: 1692 - DNA, 1479 bp, Artificial Sequence
  pCDH MSCV h20A10-O CAR CD28 1XX
atggccttaccagtgaccgccttgctcctgccgctggccttgctgctccacgccgccaggccggaggtgcagctggttgaatctggcggcggacttgtgaagcctggcggatctctgagactgagctgtgccgccagcggcttcacctttagcacatacgccatgagctgggtccgacaggcccctggaaaaggccttgaatgggttgcctctatcggcagagccggcagcacctactacagcgattctgtgaagggcagattcaccatcagccgggacaacgccaagaacagcctgtacctgcagatgaactccctgagagccgaggacaccgccgtgtactattgtgccagaggacccatctacaacgactacgacgagttcgcctattggggccagggcacactggtcacagtcagctctggcggtggcggaagcggaggcggtggctccggtggcggaggcagcgacatcgtgatgacacagagccctgatagcctggccgtgtctctgggagagagagccaccatcaactgcaagagcagccagagcgtgctgtactccagcaaccagaagaactacctggcctggtatcagcagaagcccggccagcctcctaagctgctgatctactgggccagcaccagagaaagcggcgtgcccgatagattttctggcagcggctctggcaccgacttcaccctgacaattagctccctgcaggccgaggatgtggccgtgtactactgtcaccagtacctgagcagcctgacctttggcggcggaacaaaggtggaaatcaagcgaacaacaacccctgcccccagacctcctaccccagcccctacaattgccagccagcctctgagcctgaggcccgaggcttgtagacctgctgctggcggagccgtgcacaccagaggactggatttcgcctgcgacatctacatctgggcgcccttggccgggacttgtggggtccttctcctgtcactggttatcaccctttactgcaggagtaagaggagcaggctcctgcacagtgactacatgaacatgactcctagaagacctgggcctaccagaaagcattaccagccctatgccccaccacgcgacttcgcagcctatcgctccagagtgaagttcagcaggagcgcagacgcccccgcgtacaagcagggccagaaccagctctataacgagctcaatctaggacgaagagaggagtacgatgttttggacaagagacgtggccgggaccctgagatggggggaaagccgagaaggaagaaccctcaggaaggcctgttcaatgaactgcagaaagataagatggcggaggccttcagtgagattgggatgaaaggcgagcgccggaggggcaaggggcacgatggccttttccagggtctcagtacagccaccaaggacaccttcgacgcccttcacatgcaggccctgccccctcgctgataa

SEQ ID NO: 1693 - DNA, 63 bp, Artificial Sequence; identical to SEQ ID NO: 1676
  CD8 leader sequence

SEQ ID NO: 1694 - DNA, 744 bp, Artificial Sequence; identical to SEQ ID NO: 1677
  h20A10O scFV

SEQ ID NO: 1695 - DNA, 135 bp, Artificial Sequence; identical to SEQ ID NO: 1678
  CD8 hinge region

SEQ ID NO: 1696 - DNA, 72 bp, Artificial Sequence; identical to SEQ ID NO: 656
  CD8 transmembrane region

SEQ ID NO: 1697 - DNA, 123 bp, Artificial Sequence
  CD28
aggagtaagaggagcaggctcctgcacagtgactacatgaacatgactcctagaagacctgggcctaccagaaagcattaccagccctatgccccaccacgcgacttcgcagcctatcgctcc

SEQ ID NO: 1698 - DNA, 342 bp, Artificial Sequence
  CD3 1XX
agagtgaagttcagcaggagcgcagacgcccccgcgtacaagcagggccagaaccagctctataacgagctcaatctaggacgaagagaggagtacgatgttttggacaagagacgtggccgggaccctgagatggggggaaagccgagaaggaagaaccctcaggaaggcctgttcaatgaactgcagaaagataagatggcggaggccttcagtgagattgggatgaaaggcgagcgccggaggggcaaggggcacgatggccttttccagggtctcagtacagccaccaaggacaccttcgacgcccttcacatgcaggccctgccccctcgctgataa

SEQ ID NO: 1699 - DNA, 1479 bp, Artificial Sequence
  pCDH MSCV h20A10-N CAR CD28 1XX
atggccttaccagtgaccgccttgctcctgccgctggccttgctgctccacgccgccaggccgcaggtgcagctggttgaatctggcggcggacttgtgaagcctggcggatctctgagactgagctgtgccgccagcggcttcacctttagcacatacgccatgagctggatcagacaggcccctggcaaaggcctggaatgggtggcgtctattggcagagccggcagcacctactacagcgactctgtgaagggcagattcaccatcagccgggacaacgccaagaacagcctgtacctgcagatgaactccctgagagccgaggacaccgccgtgtactattgtgccagaggacccatctacaacgactacgacgagttcgcctattggggccagggcacactggtcacagtttctagcggcggtggcggaagcggaggcggtggctccggtggcggaggcagcgaaattgtgctgacacagagccccgccacactgtcactttctccaggcgaaagagccacactgagctgcaagagcagccagagcgtgctgtactccagcaaccagaagaactacctggcctggtatcagcagaagcccggccaagctcctcggctgctgatctattgggccagcacaagagagagcggcatccctgccagattttctggcagcggctctggcaccgatttcaccctgaccataagcagcctggaacctgaggacttcgccgtgtattactgccaccagtacctgagcagcctgacctttggcggaggcaccaaggtggaaatcaagcggacaacaacccctgcccccagacctcctaccccagcccctacaattgccagccagcctctgagcctgaggcccgaggcttgtagacctgctgctggcggagccgtgcacaccagaggactggatttcgcctgcgacatctacatctgggcgcccttggccgggacttgtggggtccttctcctgtcactggttatcaccctttactgcaggagtaagaggagcaggctcctgcacagtgactacatgaacatgactcctagaagacctgggcctaccagaaagcattaccagccctatgccccaccacgcgacttcgcagcctatcgctccagagtgaagttcagcaggagcgcagacgcccccgcgtacaagcagggccagaaccagctctataacgagctcaatctaggacgaagagaggagtacgatgttttggacaagagacgtggccgggaccctgagatggggggaaagccgagaaggaagaaccctcaggaaggcctgttcaatgaactgcagaaagataagatggcggaggccttcagtgagattgggatgaaaggcgagcgccggaggggcaaggggcacgatggccttttccagggtctcagtacagccaccaaggacaccttcgacgcccttcacatgcaggccctgccccctcgctgataa

SEQ ID NO: 1700 - DNA, 63 bp, Artificial Sequence; identical to SEQ ID NO: 1676
  CD8 leader sequence

SEQ ID NO: 1701 - DNA, 744 bp, Artificial Sequence; identical to SEQ ID NO: 1580
  h20A10N scFV

SEQ ID NO: 1702 - DNA, 135 bp, Artificial Sequence; identical to SEQ ID NO: 1678
  CD8 hinge region

SEQ ID NO: 1703 - DNA, 72 bp, Artificial Sequence; identical to SEQ ID NO: 656
  CD8 transmembrane domain

SEQ ID NO: 1704 - DNA, 123 bp, Artificial Sequence; identical to SEQ ID NO: 1697
  CD28

SEQ ID NO: 1705 - DNA, 342 bp, Artificial Sequence; identical to SEQ ID NO: 1698
  CD3 1XX

SEQ ID NO: 1706 - DNA, 1479 bp, Artificial Sequence; identical to SEQ ID NO: 1596
  pCDH MSCV h20A10-C2 CAR CD28 1XX

SEQ ID NO: 1707 - DNA, 63 bp, Artificial Sequence; identical to SEQ ID NO: 1676
  CD8 leader sequence

SEQ ID NO: 1708 - DNA, 744 bp, Artificial Sequence; identical to SEQ ID NO: 1578
  h20A10C2 scFV

SEQ ID NO: 1709 - DNA, 135 bp, Artificial Sequence; identical to SEQ ID NO: 1678
  CD8 hinge region

SEQ ID NO: 1710 - DNA, 72 bp, Artificial Sequence; identical to SEQ ID NO: 656
  CD8 transmembrane region

SEQ ID NO: 1711 - DNA, 123 bp, Artificial Sequence; identical to SEQ ID NO: 1697
  CD28

SEQ ID NO: 1712 - DNA, 342 bp, Artificial Sequence; identical to SEQ ID NO: 1698
  CD3 1XX

SEQ ID NO: 1713 - DNA, 2380 bp, Artificial Sequence
  pCDH MSCV hC2 CAR 41BB 6xNFATFoxP3 IL18
atggccttaccagtgaccgccttgctcctgccgctggccttgctgctccacgccgccaggccggaggtgcagctggtggagtctgggggaggcctggtcaagcctggggggtccctgagactctcctgtgcagcctctggattcaccttcagtggctatgccatgagctgggtccgccaggctccagggaaggggctggagtgggtctcaaccattagtagtggcggaacctacatatactaccccgactcagtgaagggccgattcaccatctccagagacaacgccaagaactcactgtatctgcaaatgaacagcctgagagccgaggacacggccgtgtattactgtgcgagacttgggggggataattactacgaatacttcgatgtctggggcaaagggaccacggtcaccgtctcctccggcggtggcggatccggcggtggcggatccggcggtggcggatccgacattgtgctgacccagtctccagcctccttggccgtgtctccaggacagagggccaccatcacctgcagagccagtaagagtgtcagtaccagcggatactcctacatgcactggtatcagcagaaaccaggacaacctcctaaactcctgatttacctggcatccaatctggagagcggggtcccagccaggttcagcggcagtgggtctgggaccgatttcaccctcacaattaatcctgtggaagctaatgatactgcaaattattactgtcagcacagtagggagctgcctttcacattcggcggagggaccaaggtggagatcaaacgaactacaacaacccctgcccccagacctcctaccccagcccctacaattgccagccagcctctgagcctgaggcccgaggcttgtagacctgctgctggcggagccgtgcacaccagaggactggatttcgcctgcgacatctacatctgggcgcccttggccgggacttgtggggtccttctcctgtcactggttatcaccctttactgcaaacggggcagaaagaaactcctgtatatattcaaacaaccatttatgagaccagtacaaactactcaagaggaagatggctgtagctgccgatttccagaagaagaagaaggaggatgtgaactgagagtgaagttcagcaggagcgcagacgcccccgcgtacaagcagggccagaaccagctctataacgagctcaatctaggacgaagagaggagtacgatgttttggacaagagacgtggccgggaccctgagatggggggaaagccgagaaggaagaaccctcaggaaggcctgtacaatgaactgcagaaagataagatggcggaggcctacagtgagattgggatgaaaggcgagcgccggaggggcaaggggcacgatggcctttaccagggtctcagtacagccaccaaggacacctacgacgcccttcacatgcaggccctgccccctcgctgataagtttaaactgccagaacatttctctggcctaactggccggtaccggcttcattttttccatttactgcagaggcttcattttttccatttactgcagaggcttcattttttccatttactgcagaggcttcattttttccatttactgcagaggcttcattttttccatttactgcagaggcttcattttttccatttactgcagaactagttaggcgtgtacggtgggaggcctatataagcagagctcgtttagtgaaccgtcagatcgcctggagacgccatccacgctgttttgacctccatagaagacaccgggaccgatccagcctcgagagacccaatgctagccaccatggccttaccagtgaccgccttgctcctgccgctggccttgctgctccacgccgccaggccgtacttcggcaagctggaaagcaagctgagcgtgatccggaacctgaacgaccaggtgctgttcatcgatcagggcaacagacccctgttcgaggacatgaccgacagcgactgcagagacaacgcccctcggaccatcttcatcatcagcatgtacaaggacagccagcctagaggcatggccgtgaccatctctgtgaagtgcgagaagatcagcaccctgagctgcgagaacaagatcatcagcttcaaagagatgaacccgccggacaacatcaaggacaccaagagcgacatcatattcttccagcggagcgtgcccggccacgacaacaagatgcagtttgagagcagcagctacgagggctacttcctggcctgcgagaaagagcgggacctgttcaagctgatcctgaagaaagaggacgaactgggcgaccgcagcatcatgttcaccgtgcagaacgaggactgataa

SEQ ID NO: 1714 - DNA, 63 bp, Artificial Sequence; identical to SEQ ID NO: 1676
  CD8 leader sequence

SEQ ID NO: 1715 - DNA, 747 bp, Artificial Sequence; identical to SEQ ID NO: 238
  C2 scFV

SEQ ID NO: 1716 - DNA, 135 bp, Artificial Sequence; identical to SEQ ID NO: 1678
  CD8 hinge region

SEQ ID NO: 1717 - DNA, 72 bp, Artificial Sequence; identical to SEQ ID NO: 656
  CD8 transmembrane region

SEQ ID NO: 1718 - DNA, 126 bp, Artificial Sequence; identical to SEQ ID NO: 658
  41BB

SEQ ID NO: 1719 - DNA, 336 bp, Artificial Sequence; identical to SEQ ID NO: 660
  CD3

SEQ ID NO: 1720 - DNA, 50 bp, Artificial Sequence
  plasmid
tgataagtttaaactgccagaacatttctctggcctaactggccggtacc

SEQ ID NO: 1721 - DNA, 168 bp, Artificial Sequence
  6xNFAT FoxP3
ggcttcattttttccatttactgcagaggcttcattttttccatttactgcagaggcttcattttttccatttactgcagaggcttcattttttccatttactgcagaggcttcattttttccatttactgcagaggcttcattttttccatttactgcagaactagt

SEQ ID NO: 1722 - DNA, 118 bp, Artificial Sequence; identical to SEQ ID NO: 778
  mCMV

SEQ ID NO: 1723 - DNA, 25 bp, Artificial Sequence
  plasmid
ctcgagagacccaatgctagccacc

SEQ ID NO: 1724 - DNA, 63 bp, Artificial Sequence; identical to SEQ ID NO: 1676
  CD8 leader sequence

SEQ ID NO: 1725 - DNA, 477 bp, Artificial Sequence
  IL18
tacttcggcaagctggaaagcaagctgagcgtgatccggaacctgaacgaccaggtgctgttcatcgatcagggcaacagacccctgttcgaggacatgaccgacagcgactgcagagacaacgcccctcggaccatcttcatcatcagcatgtacaaggacagccagcctagaggcatggccgtgaccatctctgtgaagtgcgagaagatcagcaccctgagctgcgagaacaagatcatcagcttcaaagagatgaacccgccggacaacatcaaggacaccaagagcgacatcatattcttccagcggagcgtgcccggccacgacaacaagatgcagtttgagagcagcagctacgagggctacttcctggcctgcgagaaagagcgggacctgttcaagctgatcctgaagaaagaggacgaactgggcgaccgcagcatcatgttcaccgtgcagaacgaggactgataa

SEQ ID NO: 1726 - DNA, 1482 bp, Artificial Sequence; identical to SEQ ID NO: 1624
  pCDH MSCV hC2 CAR CD28 1XX

SEQ ID NO: 1727 - DNA, 63 bp, Artificial Sequence; identical to SEQ ID NO: 1676
  CD8 leader sequence

SEQ ID NO: 1728 - DNA, 747 bp, Artificial Sequence; identical to SEQ ID NO: 238
  C2 scFV

SEQ ID NO: 1729 - DNA, 135 bp, Artificial Sequence; identical to SEQ ID NO: 1678
  CD8 hinge region

SEQ ID NO: 1730 - DNA, 72 bp, Artificial Sequence; identical to SEQ ID NO: 656
  CD8 transmembrane region

SEQ ID NO: 1731 - DNA, 123 bp, Artificial Sequence; identical to SEQ ID NO: 1697
  CD28

SEQ ID NO: 1732 - DNA, 342 bp, Artificial Sequence; identical to SEQ ID NO: 1698
  CD3 1XX

SEQ ID NO: 1733 - DNA, 45 bp, Artificial Sequence; identical to SEQ ID NO: 1506
  Mouse B12 light chain variable framework 2 (FR2) sequence

SEQ ID NO: 1734 - protein, 15 aa, Artificial Sequence
  Mouse B12 light chain variable framework 2 (FR2) sequence
WYQQKPGQPPKLLIY

SEQ ID NO: 1735 - DNA, 21 bp, Artificial Sequence
  Mouse B12 light chain variable complementarity determining regions 2 (CDR2) sequence
cttgcatccaccctagattct

SEQ ID NO: 1736 - protein, 7 aa, Artificial Sequence
  Mouse B12 light chain variable complementarity determining regions 2 (CDR2) sequence
LASTLDS

SEQ ID NO: 1737 - DNA, 96 bp, Artificial Sequence; identical to SEQ ID NO: 1510
  Mouse B12 light chain variable framework 3 (FR3) sequence

SEQ ID NO: 1738 - protein, 32 aa, Artificial Sequence; identical to SEQ ID NO: 1511
  Mouse B12 light chain variable framework 3 (FR3) sequence

SEQ ID NO: 1739 - DNA, 27 bp, Artificial Sequence
  Mouse B12 light chain variable complementarity determining regions 3 (CDR3) sequence
cagcaaaataatgaggatcctccgacg

SEQ ID NO: 1740 - protein, 9 aa, Artificial Sequence
  Mouse B12 light chain variable complementarity determining regions 3 (CDR3) sequence
QQNNEDPPT

SEQ ID NO: 1741 - DNA, 31 bp, Artificial Sequence
  Mouse B12 light chain variable framework 4 (FR4) sequence
ttcggtggaggcaccaagctggaaatcaagg

SEQ ID NO: 1742 - protein, 10 aa, Artificial Sequence
  Mouse B12 light chain variable framework 4 (FR4) sequence
FGGGTKLEIK

SEQ ID NO: 1743 - protein, 10 aa, Artificial Sequence
  epitope to which NME1 and NME7AB bind part of the 10 membrane proximal PRT
PFPFSAQSGA

SEQ ID NO: 1744 - protein, 11 aa, Artificial Sequence
  epitope to which NME1 and NME7AB bind part of the 10 membrane proximal PRT
SNIKFRPGSVV

SEQ ID NO: 1745 - protein, 7 aa, Artificial Sequence
  epitope to which NME1 and NME7AB bind part of the 10 membrane proximal PRT
ASRYNLT

SEQ ID NO: 1746 - protein, 10 aa, Artificial Sequence
  Fragment of PSMGFR
GTINVHDVET

SEQ ID NO: 1747 - protein, 4 aa, Artificial Sequence
  Fragment of PSMGFR
FPFS

SEQ ID NO: 1748 - protein, 20 aa, Artificial Sequence
  Fragment of PSMGFR
SNIKFRPGSVVVQLTLAFRE

SEQ ID NO: 1749 - protein, 9 aa, Artificial Sequence
  Fragment of PSMGFR
QFNQYKTEA

SEQ ID NO: 1750 - protein, 9 aa, Artificial Sequence
  Fragment of PSMGFR
VQLTLAFRE

SEQ ID NO: 1751 - protein, 5 aa, Artificial Sequence
  Fragment of PSMGFR
SVSDV

SEQ ID NO: 1752 - DNA, 627 bp, Artificial Sequence
  IL18 sequence
atagaagacaccgggaccgatccagcctcgagagacccaatgctagccaccatggccttaccagtgaccgccttgctcctgccgctggccttgctgctccacgccgccaggccgtacttcggcaagctggaaagcaagctgagcgtgatccggaacctgaacgaccaggtgctgttcatcgatcagggcaacagacccctgttcgaggacatgaccgacagcgactgcagagacaacgcccctcggaccatcttcatcatcagcatgtacaaggacagccagcctagaggcatggccgtgaccatctctgtgaagtgcgagaagatcagcaccctgagctgcgagaacaagatcatcagcttcaaagagatgaacccgccggacaacatcaaggacaccaagagcgacatcatattcttccagcggagcgtgcccggccacgacaacaagatgcagtttgagagcagcagctacgagggctacttcctggcctgcgagaaagagcgggacctgttcaagctgatcctgaagaaagaggacgaactgggcgaccgcagcatcatgttcaccgtgcagaacgaggactgataaaagcttggcaatccggtactgttggtaaagccacca

SEQ ID NO: 1753 - protein, 207 aa, Artificial Sequence
  IL18 sequence
IEDTGTDPASRDPMLATMALPVTALLLPLALLLHAARPYFGKLESKLSVIRNLNDQVLFIDQGNRPLFEDMTDSDCRDNAPRTIFIISMYKDSQPRGMAVTISVKCEKISTLSCENKIISFKEMNPPDNIKDTKSDIIFFQRSVPGHDNKMQFESSSYEGYFLACEKERDLFKLILKKEDELGDRSIMFTVQNEDKLGNPVLLVKPP

SEQ ID NO: 1754 - DNA, 56 bp, Artificial Sequence
  Primer
agggagacccaagctggctagttaagcttggatggccttaccagtgaccgccttgc

SEQ ID NO: 1755 - DNA, 48 bp, Artificial Sequence
  Primer
taggccagagaaatgttctggcattatcagcgagggggcagggcctgc

SEQ ID NO: 1756 - DNA, 19 bp, Artificial Sequence
  Primer
tgccagaacatttctctgg

SEQ ID NO: 1757 - DNA, 52 bp, Artificial Sequence
  Primer
acagtcgaggctgatcagcgggtttaaacttatcagtcctcgttctgcacgg

SEQ ID NO: 1758 - DNA, 60 bp, Artificial Sequence
  Primer
atgcaggccctgccccctcgctgataagtttaaactgccagaacatttctctggcctaac

SEQ ID NO: 1759 - DNA, 59 bp, Artificial Sequence
  Primer
accggagcgatcgcagatccttcgcggccgcttatcagtcctcgttctgcacggtgaac

SEQ ID NO: 1760 - DNA, 31 bp, Artificial Sequence
  Primer
attgcactagttgaaagaccccacctgtagg

SEQ ID NO: 1761 - DNA, 26 bp, Artificial Sequence
  Primer
aatgctctagaatacgggtatccagg

SEQ ID NO: 1762 - DNA, 30 bp, Artificial Sequence
  Primer
atagcgaattcgtaccgagggccaccatgg

SEQ ID NO: 1763 - DNA, 44 bp, Artificial Sequence
  Primer
taggcctcccaccgtacacgcctaggtaccacgccttctgtatg

SEQ ID NO: 1764 - DNA, 44 bp, Artificial Sequence
  Primer
taggcctcccaccgtacacgcctaggtacctctgcagtaaatgg

SEQ ID NO: 1765 - DNA, 19 bp, Artificial Sequence
  Primer
taaggccatggtggctagc

SEQ ID NO: 1766 - DNA, 32 bp, Artificial Sequence
  Primer
aataagtttaaactgccagaacatttctctgg

SEQ ID NO: 1767 - DNA, 36 bp, Artificial Sequence
  Primer
atatagcggccgcttatcagtcctcgttctgcacgg

SEQ ID NO: 1768 - DNA, 347 bp, Artificial Sequence
  6x FoxP3NFAT mCMV
agaacatttctctggcctaactggccggtaccggcttcattttttccatttactgcagaggcttcattttttccatttactgcagaggcttcattttttccatttactgcagaggcttcattttttccatttactgcagaggcttcattttttccatttactgcagaggcttcattttttccatttactgcagaactagttaggcgtgtacggtgggaggcctatataagcagagctcgtttagtgaaccgtcagatcgcctggagacgccatccacgctgttttgacctccatagaagacaccgggaccgatccagcctcgagagacccaatgctagccaccatgg

SEQ ID NO: 1769 - protein, 116 aa, Artificial Sequence
  6x FoxP3NFAT mCMV
RTFLWPNWPVPASFFPFTAEASFFPFTAEASFFPFTAEASFFPFTAEASFFPFTAEASFFPFTAELVRRVRWEAYISRARLVNRQIAWRRHPRCFDLHRRHRDRSSLERPNASHHG

SEQ ID NO: 1770 - DNA, 343 bp, Artificial Sequence
  6x FoxP3NFAT mIL2P
agaacatttctctggcctaactggccggtaccggcttcattttttccatttactgcagaggcttcattttttccatttactgcagaggcttcattttttccatttactgcagaggcttcattttttccatttactgcagaggcttcattttttccatttactgcagaggcttcattttttccatttactgcagaactagtcattttgacacccccataatatttttccagaattaacagtataaattgcatctcttgttcaagagttccctatcactctctttaatcactactcacagtaacctcaactcctgcctcgagagacccaatgctagccaccatgg

SEQ ID NO: 1771 - protein, 113 aa, Artificial Sequence
  6x FoxP3NFAT mIL2P
  misc_feature (113)..(113): Xaa can be any naturally occurring amino acid
RTFLWPNWPVPASFFPFTAEASFFPFTAEASFFPFTAEASFFPFTAEASFFPFTAEASFFPFTAELVILTPPYFSRINSINCISCSRVPYHSLSLLTVTSTPASRDPMLATMX

SEQ ID NO: 1772 - DNA, 260 bp, Artificial Sequence
  6x FoxP3NFAT miniP
agaacatttctctggcctaactggccggtaccggcttcattttttccatttactgcagaggcttcattttttccatttactgcagaggcttcattttttccatttactgcagaggcttcattttttccatttactgcagaggcttcattttttccatttactgcagaggcttcattttttccatttactgcagaactagtagagggtatataatggaagctcgacttccagctcgagagacccaatgctagccaccatgg

SEQ ID NO: 1773 - protein, 86 aa, Artificial Sequence
  6x FoxP3NFAT miniP
RTFLWPNWPVPASFFPFTAEASFFPFTAEASFFPFTAEASFFPFTAEASFFPFTAEASFFPFTAELVEGIWKLDFQLERPNASHHG

SEQ ID NO: 1774 - DNA, 365 bp, Artificial Sequence
  6x IL2NFAT mCMV
agaacatttctctggcctaactggccggtaccggaggaaaaactgtttcatacagaaggcgtggaggaaaaactgtttcatacagaaggcgtggaggaaaaactgtttcatacagaaggcgtggaggaaaaactgtttcatacagaaggcgtggaggaaaaactgtttcatacagaaggcgtggaggaaaaactgtttcatacagaaggcgtactagttaggcgtgtacggtgggaggcctatataagcagagctcgtttagtgaaccgtcagatcgcctggagacgccatccacgctgttttgacctccatagaagacaccgggaccgatccagcctcgagagacccaatgctagccaccatgg

SEQ ID NO: 1775 - protein, 122 aa, Artificial Sequence
  6x IL2NFAT mCMV
RTFLWPNWPVPEEKLFHTEGVEEKLFHTEGVEEKLFHTEGVEEKLFHTEGVEEKLFHTEGVEEKLFHTEGVLVRRVRWEAYISRARLVNRQIAWRRHPRCFDLHRRHRDRSSLERPNASHHG

SEQ ID NO: 1776 - DNA, 361 bp, Artificial Sequence
  6x IL2NFAT mIL2P
agaacatttctctggcctaactggccggtaccggaggaaaaactgtttcatacagaaggcgtggaggaaaaactgtttcatacagaaggcgtggaggaaaaactgtttcatacagaaggcgtggaggaaaaactgtttcatacagaaggcgtggaggaaaaactgtttcatacagaaggcgtggaggaaaaactgtttcatacagaaggcgtactagtcattttgacacccccataatatttttccagaattaacagtataaattgcatctcttgttcaagagttccctatcactctctttaatcactactcacagtaacctcaactcctgcctcgagagacccaatgctagccaccatgg

SEQ ID NO: 1777 - protein, 119 aa, Artificial Sequence
  6x IL2NFAT mIL2P
  misc_feature (119)..(119): Xaa can be any naturally occurring amino acid
RTFLWPNWPVPEEKLFHTEGVEEKLFHTEGVEEKLFHTEGVEEKLFHTEGVEEKLFHTEGVEEKLFHTEGVLVILTPPYFSRINSINCISCSRVPYHSLSLLTVTSTPASRDPMLATMX

SEQ ID NO: 1778 - DNA, 278 bp, Artificial Sequence
  6x IL2NFAT miniP
agaacatttctctggcctaactggccggtaccggaggaaaaactgtttcatacagaaggcgtggaggaaaaactgtttcatacagaaggcgtggaggaaaaactgtttcatacagaaggcgtggaggaaaaactgtttcatacagaaggcgtggaggaaaaactgtttcatacagaaggcgtggaggaaaaactgtttcatacagaaggcgtactagtagagggtatataatggaagctcgacttccagctcgagagacccaatgctagccaccatgg

SEQ ID NO: 1779 - protein, 92 aa, Artificial Sequence
  6x IL2NFAT miniP
RTFLWPNWPVPEEKLFHTEGVEEKLFHTEGVEEKLFHTEGVEEKLFHTEGVEEKLFHTEGVEEKLFHTEGVLVEGIWKLDFQLERPNASHHG

SEQ ID NO: 1780 - DNA, 459 bp, Artificial Sequence
  Human NME1
atggccaactgtgagcgtaccttcattgcgatcaaaccagatggggtccagcggggtcttgtgggagagattatcaagcgttttgagcagaaaggattccgccttgttggtctgaaattcatgcaagcttccgaagatcttctcaaggaacactacgttgacctgaaggaccgtccattctttgccggcctggtgaaatacatgcactcagggccggtagttgccatggtctgggaggggctgaatgtggtgaagacgggccgagtcatgctcggggagaccaaccctgcagactccaagcctgggaccatccgtggagacttctgcatacaagttggcaggaacattatacatggcagtgattctgtggagagtgcagagaaggagatcggcttgtggtttcaccctgaggaactggtagattacacgagctgtgctcagaactggatctatgaatga

SEQ ID NO: 1781 - protein, 152 aa, Artificial Sequence
  Human NME1
MANCERTFIAIKPDGVQRGLVGEIIKRFEQKGFRLVGLKFMQASEDLLKEHYVDLKDRPFFAGLVKYMHSGPVVAMVWEGLNVVKTGRVMLGETNPADSKPGTIRGDFCIQVGRNIIHGSDSVESAEKEIGLWFHPEELVDYTSCAQNWIYE

SEQ ID NO: 1782 - DNA, 1131 bp, Artificial Sequence
  Human NME7
atgaatcatagtgaaagattcgttttcattgcagagtggtatgatccaaatgcttcacttcttcgacgttatgagcttttattttacccaggggatggatctgttgaaatgcatgatgtaaagaatcatcgcacctttttaaagcggaccaaatatgataacctgcacttggaagatttatttataggcaacaaagtgaatgtcttttctcgacaactggtattaattgactatggggatcaatatacagctcgccagctgggcagtaggaaagaaaaaacgctagccctaattaaaccagatgcaatatcaaaggctggagaaataattgaaataataaacaaagctggatttactataaccaaactcaaaatgatgatgctttcaaggaaagaagcattggattttcatgtagatcaccagtcaagaccctttttcaatgagctgatccagtttattacaactggtcctattattgccatggagattttaagagatgatgctatatgtgaatggaaaagactgctgggacctgcaaactctggagtggcacgcacagatgcttctgaaagcattagagccctctttggaacagatggcataagaaatgcagcgcatggccctgattcttttgcttctgcggccagagaaatggagttgttttttccttcaagtggaggttgtgggccggcaaacactgctaaatttactaattgtacctgttgcattgttaaaccccatgctgtcagtgaaggactgttgggaaagatcctgatggctatccgagatgcaggttttgaaatctcagctatgcagatgttcaatatggatcgggttaatgttgaggaattctatgaagtttataaaggagtagtgaccgaatatcatgacatggtgacagaaatgtattctggcccttgtgtagcaatggagattcaacagaataatgctacaaagacatttcgagaattttgtggacctgctgatcctgaaattgcccggcatttacgccctggaactctcagagcaatctttggtaaaactaagatccagaatgctgttcactgtactgatctgccagaggatggcctattagaggttcaatacttcttcaagatcttggataattag

SEQ ID NO: 1783 - protein, 376 aa, Artificial Sequence
  Human NME7
MNHSERFVFIAEWYDPNASLLRRYELLFYPGDGSVEMHDVKNHRTFLKRTKYDNLHLEDLFIGNKVNVFSRQLVLIDYGDQYTARQLGSRKEKTLALIKPDAISKAGEIIEIINKAGFTITKLKMMMLSRKEALDFHVDHQSRPFFNELIQFITTGPIIAMEILRDDAICEWKRLLGPANSGVARTDASESIRALFGTDGIRNAAHGPDSFASAAREMELFFPSSGGCGPANTAKFTNCTCCIVKPHAVSEGLLGKILMAIRDAGFEISAMQMFNMDRVNVEEFYEVYKGVVTEYHDMVTEMYSGPCVAMEIQQNNATKTFREFCGPADPEIARHLRPGTLRAIFGKTKIQNAVHCTDLPEDGLLEVQYFFKILDN

SEQ ID NO: 1784 - DNA, 1359 bp, Artificial Sequence
  Humanized C2 IgG1 heavy chain sequence
gaggtgcagctggtggagtctgggggaggcctggtcaagcctggggggtccctgagactctcctgtgcagcctctggattcaccttcagtggctatgccatgagctgggtccgccaggctccagggaaggggctggagtgggtctcaaccattagtagtggcggaacctacatatactaccccgactcagtgaagggccgattcaccatctccagagacaacgccaagaactcactgtatctgcaaatgaacagcctgagagccgaggacacggccgtgtattactgtgcgagacttgggggggataattactacgaatacttcgatgtctggggcaaagggaccacggtcaccgtctcctccgctagcaccaagggcccatcggtcttccccctggcaccctcctccaagagcacctctgggggcacagcggccctgggctgcctggtcaaggactacttccccgaaccggtgacggtgtcgtggaactcaggcgccctgaccagcggcgtgcacaccttcccggctgtcctacagtcctcaggactctactccctcagcagcgtggtgacagtgccctccagcagcttgggcacccagacctacatctgcaacgtgaatcacaagcccagcaacaccaaggtggacaagaaagttgagcccaaatcttgtgacaaaactcacacatgcccaccgtgcccagcacctgaactcctggggggaccgtcagtcttcctcttccccccaaaacccaaggacaccctcatgatctcccggacccctgaggtcacatgcgtggtggtggacgtgagccacgaagaccctgaggtcaagttcaactggtacgtggacggcgtggaggtgcataatgccaagacaaagccgcgggaggagcagtacaacagcacgtaccgtgtggtcagcgtcctcaccgtcctgcaccaggactggctgaatggcaaggagtacaagtgcaaggtctccaacaaagccctcccagcccccatcgagaaaaccatctccaaagccaaagggcagccccgagaaccacaggtgtacaccctgcccccatcccgggaggagatgaccaagaaccaggtcagcctgacctgcctggtcaaaggcttctatcccagcgacatcgccgtggagtgggagagcaatgggcagccggagaacaactacaagaccacgcctcccgtgctggactccgacggctccttcttcctctacagcaagctcaccgtggacaagagcaggtggcagcaggggaacgtcttctcatgctccgtgatgcatgaggctctgcacaaccactacacgcagaagagcctctccctgtctccgggtaaatgataa

SEQ ID NO: 1785 - protein, 12 aa, Artificial Sequence
  Mouse 17H6 heavy chain variable complementarity determining regions 3 (CDR3) sequence
DYYGSNPAWFAY

SEQ ID NO: 1786 - protein, 11 aa, Artificial Sequence
  Mouse 17H6 heavy chain variable framework 4 (FW4) sequence
WGQGTLVTVSA

SEQ ID NO: 1787 - DNA, 72 bp, Artificial Sequence; identical to SEQ ID NO: 656
  CD8 transmembrane domain

SEQ ID NO: 1788 - DNA, 126 bp, Artificial Sequence; identical to SEQ ID NO: 658
  41BB

SEQ ID NO: 1789 - DNA, 342 bp, Artificial Sequence; identical to SEQ ID NO: 1684
  CD3

SEQ ID NO: 1790 - DNA, 1482 bp, Artificial Sequence
  pCDH MSCV h20A10-N CAR 41BB
atggccttaccagtgaccgccttgctcctgccgctggccttgctgctccacgccgccaggccgcaggtgcagctggttgaatctggcggcggacttgtgaagcctggcggatctctgagactgagctgtgccgccagcggcttcacctttagcacatacgccatgagctggatcagacaggcccctggcaaaggcctggaatgggtggcgtctattggcagagccggcagcacctactacagcgactctgtgaagggcagattcaccatcagccgggacaacgccaagaacagcctgtacctgcagatgaactccctgagagccgaggacaccgccgtgtactattgtgccagaggacccatctacaacgactacgacgagttcgcctattggggccagggcacactggtcacagtttctagcggcggtggcggaagcggaggcggtggctccggtggcggaggcagcgaaattgtgctgacacagagccccgccacactgtcactttctccaggcgaaagagccacactgagctgcaagagcagccagagcgtgctgtactccagcaaccagaagaactacctggcctggtatcagcagaagcccggccaagctcctcggctgctgatctattgggccagcacaagagagagcggcatccctgccagattttctggcagcggctctggcaccgatttcaccctgaccataagcagcctggaacctgaggacttcgccgtgtattactgccaccagtacctgagcagcctgacctttggcggaggcaccaaggtggaaatcaagcggacaacaacccctgcccccagacctcctaccccagcccctacaattgccagccagcctctgagcctgaggcccgaggcttgtagacctgctgctggcggagccgtgcacaccagaggactggatttcgcctgcgacatctacatctgggcgcccttggccgggacttgtggggtccttctcctgtcactggttatcaccctttactgcaaacggggcagaaagaaactcctgtatatattcaaacaaccatttatgagaccagtacaaactactcaagaggaagatggctgtagctgccgatttccagaagaagaagaaggaggatgtgaactgagagtgaagttcagcaggagcgcagacgcccccgcgtacaagcagggccagaaccagctctataacgagctcaatctaggacgaagagaggagtacgatgttttggacaagagacgtggccgggaccctgagatggggggaaagccgagaaggaagaaccctcaggaaggcctgtacaatgaactgcagaaagataagatggcggaggcctacagtgagattgggatgaaaggcgagcgccggaggggcaaggggcacgatggcctttaccagggtctcagtacagccaccaaggacacctacgacgcccttcacatgcaggccctgccccctcgctgataa

1. An antibody, or fragment thereof, for the diagnosis, treatment or prevention of cancers wherein the antibody specifically binds to the PSMGFR peptide (SEQ ID NO:2) or a fragment thereof of the peptide.

2. The antibody, or fragment thereof of claim 1, which binds to the N−10 peptide (SEQ ID NO:3), N−19 peptide (SEQ ID NO:4), N−23 peptide (SEQ ID NO:5), N−26 peptide (SEQ ID NO:6), N−30 peptide (SEQ ID NO:7), N−10/C−5 peptide (SEQ ID NO:8), N−19/C−5 peptide (SEQ ID NO:9), or C−5 peptide (SEQ ID NO:825).

3. The antibody, or fragment thereof, of claim 1, which interacts with a peptide comprising conformational epitope SVSDV (SEQ ID NO:1751) and FPSA (SEQ ID NO:1747) within N−26 sequence ISDVSVSDVPFPFSAQSGA (SEQ ID NO:6), wherein mutation or deletion of FPFS (SEQ ID NO:1747) destroys binding of the antibody or fragment thereof to the N−26 peptide.

4. The antibody, or fragment thereof, of claim 1, which interacts with a peptide comprising conformational epitope ASRYNLT (SEQ ID NO:1745), SVSDV (SEQ ID NO:1751), and FPSA (SEQ ID NO:1747) within the N−19 sequence ASRYNLT ISDVSVSDVPFPFSAQSGA (SEQ ID NO:4), wherein mutation or deletion of ASRYNLT (SEQ ID NO:1745) destroys binding of the antibody or fragment thereof to the N−26 peptide.

5. The antibody, or fragment thereof, of claim 1, which does not bind to the C−10 peptide (SEQ ID NO:825).

6. The antibody, or fragment thereof of claim 5, which binds to the N−10 peptide (SEQ ID NO:3), but not to the C−10 peptide (SEQ ID NO:825).

7. The antibody, or fragment thereof, of claim 1, which inhibits interaction between NME7_{AB} and MUC1*.

8. The antibody, or fragment thereof, of claim 1, which inhibits interaction between NME7_{AB} and PSMGFR peptide (SEQ ID NO:2).

9. The antibody, or fragment thereof, of claim 2, which inhibits interaction between NME7_{AB} and N−10 peptide (SEQ ID NO:3), N−19 peptide (SEQ ID NO:4), N−23 peptide (SEQ ID NO:5), N−26 peptide (SEQ ID NO:6), N−30 peptide (SEQ ID NO:7), N−10/C−5 peptide (SEQ ID NO:8), N−19/C−5 peptide (SEQ ID NO:9), or C−5 peptide (SEQ ID NO:825).

10. An antibody, or fragment thereof, of claim 1, wherein the antibody recognizes a MUC1 transmembrane enzymatic cleavage product.

11. The antibody, or fragment thereof, of claim 10, wherein the cleavage enzyme is MMP14 or MMP9 or a catalytically active fragment thereof of the enzyme.

12. The antibody, or fragment thereof, of claim 1, which binds to PSMGFR (SEQ ID NO:2) or fragment thereof in which presence of an amino acid sequence within PSMGFR (SEQ ID NO:2) induces binding of the antibody to the PSMGFR.

13. The antibody of claim 12, wherein the amino acid sequence of the binding conformationally inducing peptide is present in N−10 peptide (SEQ ID NO:3).

14. The antibody, or fragment thereof, of claim 12, which does not bind to a linear form of the binding conformationally inducing peptide sequence wherein the linear form of the peptide is a denatured form.

15. The antibody, or fragment thereof, of claim 14, wherein the binding conformationally inducing peptide sequence is in the N−26 peptide sequence ISDVSVSDVPFPFSAQSGA (SEQ ID NO:6), wherein mutation or deletion of FPFS (SEQ ID NO:1747) destroys binding of the antibody or fragment thereof to the N−26 peptide.

16. The antibody, or fragment thereof, of claim 14, wherein the binding conformationally inducing peptide sequence is located within the N−19 sequence ASRYNLTISDVSVSDVPFPFSAQSGA (SEQ ID NO:4), wherein mutation or deletion of ASRYNLT (SEQ ID NO:1745) destroys binding of the antibody or fragment thereof to the N−19 peptide.

17. An antibody, or fragment thereof, for the diagnosis, treatment or prevention of cancers wherein a binding inducing peptide sequence is located within the N−26 sequence ISDVSVSDVPFPFSAQSGA (SEQ ID NO:6), wherein mutation or deletion within FPFS (SEQ ID NO:1747) destroys binding of the antibody or fragment thereof to PSMGFR.

18. The antibody, or fragment thereof of claim 17, wherein
heavy chain CDR1 comprises consensus sequence at least 90% identical to sequence: F or I at position 1, T at position 2, F at position 3, S at position 4, T, G, or R at position 5, Y at position 6, A, G or T at position 7, M at position 8 and S at position 9;
heavy Chain CDR2 comprises consensus sequence at least 90% identical to sequence: T at position 1, I or S at position 2, I or S at position 3, G or R at position 5, G or A at position 6, T or I at position 9, Y at position 10, Y at position 11, P or S at position 12 and DSVKG for positions 13-17;
heavy chain CDR3 comprises consensus sequence at least 90% identical to sequence: G, L, or N at position 2, G or T at position 4, Y at position 7, D or E at position 12, A at position 14, and Y at position 15;
light chain CDR1 comprises consensus sequence at least 90% identical to sequence: K or R at position 1, A or S at position 2, S at position 3, K or Q at position 4, S at position 5, L or V at position 6, L at position 7, T or S at position 10, Y at position 15, and I, L or M at position 16;
light Chain CDR2 comprises consensus sequence at least 90% identical to sequence: L or W, or S at position 1, A or T at position 2, S at position 3, N or T at position 4, L or R at position 5, E or A at position 6, and S at position 7; and
light chain CDR3 comprises consensus sequence at least 90% identical to sequence: Q at position 1, H or Q at position 2, S, Q or R at position 3, R, S or Y at position 4, E, L, or S at position 5, L or S at position 6, P or S at position 7, F or L at position 8 and T at position 9.

19. An antibody, or fragment thereof, for the diagnosis, treatment or prevention of cancers wherein binding conformationally inducing peptide is within the N−26 sequence ISDVSVSDVPFPFSAQSGA (SEQ ID NO:6), wherein mutation or deletion within FPFS (SEQ ID NO:1747), SVSDV (SEQ ID NO:1751), or ASRYNLT (SEQ ID NO:1745) destroys binding of the antibody or fragment thereof to PSMGFR.

20. The antibody, or fragment thereof of claim 17, wherein
wherein
heavy chain CDR1 comprises consensus sequence at least 90% identical to sequence: F or I at position 1, T or A at position 2, F at position 3, S at position 4, T, G, or R at position 5, Y or F at position 6, A, G or T at position 7, M at position 8 and S at position 9;
heavy Chain CDR2 comprises consensus sequence at least 90% identical to sequence: T or A at position 1, I or S at position 2, I or S at position 3, N, S, T or G at position 4, G or R at position 5, G or A at position 6, G, T, or D at position 7, Y, K, H or S at position 8, T or I at position 9, Y or F at position 10, Y at position 11, P or S at position 12 and D at position 13, S or T at position 14, V or L at position 15 and KG for positions 16-17;
heavy chain CDR3 comprises consensus sequence at least 90% identical to sequence: G, L, or N at position 2, G, T, or Y at position 3, G or T at position 4, Y at position 7, Y, A, or G at position 10, M, D or F at position 11, D or E at position 12 and AY at position 14-15;
light chain CDR1 comprises consensus sequence at least 90% identical to sequence: K or R at position 1, A or S at position 2, S or R at position 3, S, Y, I or V at position 8, T or S at position 10, G, S, D, or Q at position 12, V, Y, K or N at position 13, N, S, or T at position 14, Y or F at position 15, and I, L or M at position 16;
light Chain CDR2 comprises consensus sequence at least 90% identical to sequence: A, T or V at position 2, S at position 3, N, T, or K at position 4, L or R at position 5, E, A, F or D at position 6, and S at position 7; and
light chain CDR3 comprises consensus sequence at least 90% identical to sequence: Q, F or W at position 1, H or Q at position 2, R, S, T, Y or N at position 4, E, L, S or H at position 5, L, S, V, D or Y at position 6, P or S at position 7, and T at position 9.

21. The antibody, or fragment thereof of claim 17, which is MNC2, having heavy chain CDR1 comprises consensus sequence FTFSGYAMS;
heavy Chain CDR2 comprises consensus sequence TISSGGTYIYYPDSVKG;
heavy chain CDR3 comprises consensus sequence -LGGDNYYEYFDV--;
light chain CDR1 comprises consensus sequence RASKS--VSTSGYSYMH;
light Chain CDR2 comprises consensus sequence LASNLES; and
light chain CDR3 comprises consensus sequence QHSRELPFT.

22. The antibody, or fragment thereof of claim 17, which is MNE6, having heavy chain CDR1 comprises consensus sequence FTFSRYGMS;
heavy Chain CDR2 comprises consensus sequence TISGGGTYIYYPDSVKG;
heavy chain CDR3 comprises consensus sequence DNYGRNYDYGMDY--;
light chain CDR1 comprises consensus sequence -------SATSSVSYIH;
light Chain CDR2 comprises consensus sequence STSNLAS; and
light chain CDR3 comprises consensus sequence QQRSSSPFT.

23. The antibody, or fragment thereof of claim 17, which is B2, having heavy chain CDR1 comprises consensus sequence FAFSTFAMS;
heavy Chain CDR2 comprises consensus sequence AISNGGGYTYYPDTLKG;
heavy chain CDR3 comprises consensus sequence ----RYYDLYFDL--;
light chain CDR1 comprises consensus sequence RSSQNIV-HSNGNTYLE;
light Chain CDR2 comprises consensus sequence KVSNRFS; and
light chain CDR3 comprises consensus sequence FQDSHVPLT.

24. The antibody, or fragment thereof of claim 17, which is B7, having heavy chain CDR1 comprises consensus sequence FTFSRYGMS;
heavy Chain CDR2 comprises consensus sequence TISSGGTYIYYPDSVKG;
heavy chain CDR3 comprises consensus sequence DNYGSSYDYAMDY--;
light chain CDR1 comprises consensus sequence RSSQTIV-HSNGNTYLE;
light Chain CDR2 comprises consensus sequence KVSNRFS; and
light chain CDR3 comprises consensus sequence FQDSHVPLT.

25. The antibody, or fragment thereof of claim 17, which is B9, having heavy chain CDR1 comprises consensus sequence FTFSRYGMS;
heavy Chain CDR2 comprises consensus sequence TISSGGTYIYYPDSVKG;
heavy chain CDR3 comprises consensus sequence DNYGSSYDYAMDY--;
light chain CDR1 comprises consensus sequence -------SASSSVSYMH;
light Chain CDR2 comprises consensus sequence TTSNLAS; and
light chain CDR3 comprises consensus sequence QQRSSYPF-.

26. The antibody, or fragment thereof of claim 17, which is 8C7F3, having heavy chain CDR1 comprises consensus sequence FTFSTYAMS;
heavy Chain CDR2 comprises consensus sequence AISNGGGYTYYPDSLKG;
heavy chain CDR3 comprises consensus sequence ----RYYDHYFDY--;
light chain CDR1 comprises consensus sequence --RASESVATYGNNFMQ;
light Chain CDR2 comprises consensus sequence LASTLDS; and
light chain CDR3 comprises consensus sequence QQNNEDPPT.

27. The antibody, or fragment thereof of claim 17, which is H11, having heavy chain CDR1 comprises consensus sequence FAFSTFAMS;
heavy Chain CDR2 comprises consensus sequence AISNGGGYTYYPDTLKG;
heavy chain CDR3 comprises consensus sequence ----RYYDLYFDL--;
light chain CDR1 comprises consensus sequence RSSQNIV-HSNGNTYLE;
light Chain CDR2 comprises consensus sequence KVSNRFS; and
light chain CDR3 comprises consensus sequence FQDSHVPLT.

28. The antibody, or fragment thereof of claim 17, which is B12, having heavy chain CDR1 comprises consensus sequence SYGVH;
heavy Chain CDR2 comprises consensus sequence VIWPGGSTNYNSTLMSRM;
heavy chain CDR3 comprises consensus sequence DRTPRVGAWFAY; and
light chain CDR1 comprises consensus sequence RASESVATYGNNFMQ;
light Chain CDR2 comprises consensus sequence LASTLDS; and
light chain CDR3 comprises consensus sequence QQNNEDPPT.

29. The antibody, or fragment thereof of claim 17, which is 20A10, having heavy chain CDR1 comprises consensus sequence FTFSTYAMS;
heavy Chain CDR2 comprises consensus sequence -SIGRAGSTYYSDSVKG;
heavy chain CDR3 comprises consensus sequence ---GPIYNDYDEFAY;
light chain CDR1 comprises consensus sequence KSSQSVLYSSNQKNYLA;
light Chain CDR2 comprises consensus sequence WASTRES; and
light chain CDR3 comprises consensus sequence HQYLSSLT.

30. The antibody, or fragment thereof of claim 17, which is 3C2B1, having heavy chain CDR1 comprises consensus sequence ITFSTYTMS;
heavy Chain CDR2 comprises consensus sequence TISTGGDKTYYSDSVKG;
heavy chain CDR3 comprises consensus sequence -GTTAMYYYAMDY;
light chain CDR1 comprises consensus sequence RASKS---ISTSDYNYIH;
light Chain CDR2 comprises consensus sequence LASNLES; and
light chain CDR3 comprises consensus sequence QHSRELPLT.

31. An antibody, or fragment thereof, for the diagnosis, treatment or prevention of cancers that requires presence of antibody binding conformationally inducing peptide ASRYNLT (SEQ ID NO:1745) of PSMGFR (SEQ ID NO:2).

32. The antibody, or fragment thereof of claim 31, which is 25E6, having heavy chain CDR1 comprises consensus sequence FTFSSYGMS;
heavy Chain CDR2 comprises consensus sequence TISNGGRHTFYPDSVKG;
heavy chain CDR3 comprises consensus sequence QTGTEGWFAY;
light chain CDR1 comprises consensus sequence KSSQSLLDSDGKTYLN;
light Chain CDR2 comprises consensus sequence LVSKLDS_; and
light chain CDR3 comprises consensus sequence WQGTHFPQT.

33. An antibody, or fragment thereof, for the diagnosis, treatment or prevention of cancers that requires presence of antibody binding conformationally inducing peptide SVSDV (SEQ ID NO:1761) of PSMGFR (SEQ ID NO:2).

34. The antibody of claim 33, which is 5C6F3, having heavy chain CDR1 comprises consensus sequence FTFSTYAMS;
heavy Chain CDR2 comprises consensus sequence AISNGGGYTYYPDSLKG;
heavy chain CDR3 comprises consensus sequence RYYDHYFDY;
light chain CDR1 comprises consensus sequence RSSQTIVHSNGNTYLE;
light Chain CDR2 comprises consensus sequence KVSNRFS; and
light chain CDR3 comprises consensus sequence FQDSHVPLT.

35. The antibody or fragment thereof according to claim 1, which is murine, camelid, human or humanized.

36. The antibody or fragment thereof according to claim 1, wherein the antibody fragment is scFv or scFv-Fc, which variable regions thereof may be murine, camelid, human or humanized.

37. A chimeric antigen receptor (CAR) comprising the antibody fragment of claim 36.

38. A chimeric antigen receptor (CAR) comprising the antibody fragment of claim 36, further comprising mutations in the co-stimulatory domain or CD3-zeta signaling domain.

39. The CAR of claim 38, wherein tyrosines are mutated in CD28 or 4-1BB.

40. The CAR of claim 38, wherein the CD3-zeta contains 1XX mutations.

41. An immune cell comprising the CAR of claim 37.

42. The immune cell of claim 41, which is a T cell, NK cell, dendritic cell, or mast cell.

43. A cell composition expressed in a cell comprising a CARs of claim 37, and second entity having a biological recognition unit that has a specificity that is different from that of the CAR.

44. The composition of claim 43, wherein the second entity binds PD-1, PDL-1, or other checkpoint inhibitor.

45. The composition of claim 43, wherein the second entity binds to NME7.

46. The composition of claim 43, wherein the second entity is a cytokine.

47. The composition of claim 46, wherein the cytokine is IL-12.

48. The composition of claim 46, wherein the cytokine is IL-18.

49. The composition of claim 43, wherein the second entity is c-Jun.

50. An immune cell engineered to express a nucleic encoding a CAR of claim 37 and a nucleic acid encoding a second entity as in any of the claims above wherein the second entity expressed from an inducible promoter.

51. The immune cell of claim 50, wherein the second entity is expressed from an inducible promoter that is activated by elements of an activated immune cell.

52. The immune cell of claim 51, wherein the second entity is expressed from an NFAT inducible promoter.

53. The immune cell of claim 52, wherein the NFAT is NFATc1, NFATc3 or NFATc2.

54. The immune cell of claim 50, wherein the second entity is a cytokine.

55. The immune cell of claim 51, wherein the cytokine is IL-7, IL-15, or IL-18.

56. The immune cell of claim 50, wherein the nucleic acids encoding the second entity are inserted into a Foxp3 promoter or enhancer region.

57. The immune cell of claim 56, wherein the cytokine is IL-18.

58. The immune cell of claim 56, wherein the cytokine is expressed from an NFAT inducible promoter.

59. A BiTE construct comprising the antibody fragment of claim 36.

60. An antibody drug conjugate (ADC) comprising the antibody or antibody fragment of claim 35.

61. An antibody or fragment thereof that specifically binds to PSMGFR (SEQ ID NO:2) and N−10 (SEQ ID NO:3); and
(i) does not bind to full-length MUC1;
(ii) does not bind to C−10 (SEQ ID NO:825);
(iii) competitively inhibits binding of NME1 or NME7_{AB} to MUC1* extra cellular domain or a PSMGFR peptide;
(iv) recognizes a MUC1* generated by cleavage by a cleavage enzyme;
(v) recognizes a conformational epitope and not a linear epitope; or
(vi) is cancer selective by immunohistochemistry on tissues.

62. The antibody or fragment thereof of claim 61, wherein four of the criteria (i)-(vi) are satisfied.

63. The antibody or fragment thereof of claim 61, wherein five of the criteria (i)-(vi) are satisfied.

64. The antibody or fragment thereof of claim 61, wherein six of the criteria (i)-(vi) are satisfied.

65. The antibody or fragment thereof of claim 61, wherein at least criteria (vi) is satisfied.

66. The antibody or fragment thereof of claim 61, wherein cleavage enzyme is MMP-9.

67. The antibody or fragment thereof of claim 1, wherein the cancer is breast cancer, pancreatic cancer, ovarian cancer, lung cancer, colon cancer, gastric cancer or esophageal cancer.
